(19) United States
(12) Patent Application Publication
(10) Pub. No.: US 2019/0004065 A1
(43) Pub. Date: Jan. 3, 2019

(54) BIOMARKERS FOR STROKE

(71) Applicant: MOREHOUSE SCHOOL OF MEDICINE, Atlanta, GA (US)

(72) Inventors: Byron D. FORD, Riverside, CA (US); Gregory FORD, Cartersville, GA (US)

(21) Appl. No.: 15/901,523

(22) Filed: Feb. 21, 2018

Related U.S. Application Data
(63) Continuation of application No. 13/204,358, filed on Aug. 5, 2011, now abandoned.

(51) Int. Cl. G01N 33/68; C12Q 1/6883

(52) U.S. Cl. CPC G01N 33/6893; G01N 2800/60; G01N 2800/56; G01N 2800/52; G01N 2800/2871; C12Q 2600/158; C12Q 1/6883

(57) ABSTRACT

Biomarkers for stroke and methods for their detection are disclosed. In one aspect, the present application discloses biomarkers for the diagnosis of stroke in a subject. In another aspect, the application discloses a method for the diagnosis of stroke in a subject. The method comprises detection of stroke biomarkers in cerebrospinal fluid, blood, serum or PMBCs of a subject. Also disclosed is a kit for the detection of biomarkers for the diagnosis of stroke in a subject.

[0001] This application is a Continuation of U.S. application Ser. No. 13/204,358, filed Aug. 5, 2011, which claims priority from U.S. Provisional Patent Application No. 61/344,517, filed on Aug. 13, 2010. The entirety of the aforementioned application is incorporated herein by reference.

### FIELD

[0002] This application generally relates to the diagnosis, management and therapy of stroke. In particular, the invention relates to methods and kits for the diagnosis and monitoring the progression and treatment of stroke in a subject.

### BACKGROUND

[0003] Stroke is a debilitating condition with limited treatment options. Currently, thrombolysis is the only approved therapy for stroke. However, thrombolysis is effective in only 3-5% of stroke patients, primarily due to its very short therapeutic window. Stabilization of stroke patients inside and outside the therapeutic window for thrombolysis is also essential to prevent the progression of the initial ischemic lesion into expanding regions of brain damage. Imaging techniques, including computed tomography (CT) scanning and magnetic resonance imaging (MRI) are very useful in detecting the occurrence, type and severity of strokes. However, these technologies are expensive and require considerable amounts of time to develop a complete and correct diagnosis. This is particularly true in rural areas and cities with large, underserved populations.

[0004] In addition to the failure to produce effective therapies for stroke treatment, a dramatic disparity exists in the rate of mortality from stroke between African-Americans and white counterparts. Reducing health disparities associated with stroke remains a major public health challenge in the United States. Despite dramatic declines in stroke mortality between 1970 and 1990 for both white and African-Americans, African-American men and women still have almost twice the rate of death due to stroke as their white counterparts.

[0005] Prompt diagnosis of a stroke is important, as delays in diagnosis and medical intervention may contribute to clinical deterioration and disability. Early diagnosis enables clinicians to more effectively choose the emergency intervention such as anti-platelet and/or neuroprotective therapy, and also to make better prognoses of disease outcome. Successful treatment of stroke requires rapid state diagnosis. Delays in diagnosis reduce the amount of time available in which the brain can respond to reperfusion, and significantly increase the risk of hemorrhage after most of the permanent injury has occurred.

[0006] There has been a long-felt need to develop rapid, accessible and easy to use diagnostic tools to identify and treat stroke symptoms. The use of blood biomarkers for stroke has been long considered an excellent method to determine the occurrence, timing, subtype and severity of stroke. Blood biomarkers can also be used to determine the efficacy of existing and novel treatment strategies for stroke.

[0007] The search for specific, reliable and clinically useful biomarkers has been largely unsuccessful. Many biomarkers that were believed to have promise are only detectable many hours or days after a stroke, by which time they would no longer be helpful (Anand, N et al. (2005) Cerebrovasc Dis 20:213-219). Additionally, some assays for markers of interest require labor-intensive laboratory work, requiring long turn-around time for results and limited availability.

[0008] An ideal biomarker should be specific to the type of stroke (such as ischemic stroke), sensitive (early and immediate release), predictive (proportionate to the extent of injury), robust (accurate and inexpensive), non-invasive and bridge pre-clinical results and clinical validation. Advanced technologies including genomic analysis and proteomics have facilitated the discovery of effective cancer biomarkers and could lead to discovery of stroke markers. One advantage of high throughput microarray-based genomic and proteomic analyses is the capacity to identify a group or cluster of genes and proteins with altered expression patterns in tissue or body fluids that encode putative secreted or cell-surface proteins. An ischemic stroke genomic biomarker would be a measurable RNA characteristic that is an indicator of normal biological processes, ischemic injury and/or response to therapeutic interventions. A proteomic biomarker would detect peptides or proteins in plasma or serum. It is also important that a stroke biomarker correlate well with findings from neuroimaging and clinical diagnostic examinations.

### SUMMARY

[0009] One aspect of the present invention relates to a method for diagnosing stroke in a subject. The method comprises the steps of (a) measuring the level of one or more biomarkers in a sample from the subject; (b) comparing the level of the one or more biomarkers to a reference level of the one or more biomarkers; and (c) making a diagnosis based on the result of the comparing step. The one or more biomarkers comprise gene products expressed from genes selected from the group consisting of IL-1α, IL-1β, IL-1ra, IL-3, IL-2, IL-4, IL-5, IL-6, IL-7, IL-8, IL-9, IL-10, IL-12 (p40), IL-12(p70), IL-13, IL-15, IL-17, EGF, Eotaxin, FGF-2, FTL-3 ligand, Fractalkine, G-CSF, GM-CSF, GRO, IFN-α2, IFN-γ, IP-10, MCP-1, MCP-3, MCD, MIP-1α, MIP-1β, PDGF-aa, PGDF-aa bb, RANTES, sCD40L, sIL2-rα, TNF-α, TNF-β, VEGF and genes listed in Tables 4, 5, 6 and 8.

[0010] In one embodiment, the one or more biomarkers are polynucleotides.

[0011] In another embodiment, the one or more biomarkers are proteins or peptides.

[0012] In another embodiment, step (a) includes measuring a panel of three or more biomarkers in the sample from the subject.

[0013] In another embodiment, step (a) includes measuring a panel of three or more biomarkers in the sample from the subject. In certain embodiments, the panel comprises at least one immediate early stroke biomarker (i.e., markers diferentially expressed at 1 hour post-stroke), at least one early stroke biomarker (i.e., markers diferentially expressed at 2 hour post-stroke) and at least one late stroke biomarker (i.e., diferentially expressed at 24 hour post-stroke). In certain other embodiments, the panel comprises at least two immediate early stroke biomarker (diferentially expressed at 1 hour post-stroke), at least two early stroke biomarker (diferentially expressed at 2 hour post-stroke) and at least two late stroke biomarker (diferentially expressed at 24 hour post-stroke). In certain other embodiments, the panel comprises at least three immediate early stroke biomarkers, at least three early stroke biomarkers and at least three late stroke biomarkers.

[0014] Another aspect of the present invention relates to a method for determining disease progression in a subject after a stroke. The method comprises the steps of (a) measuring the level of one or more biomarkers in a first sample obtained from the subject at a first time point; (b) measuring the level of the one or more biomarkers in a second sample obtained from the subject at a second time point; (c) comparing the level of the one or more biomarkers at the first time point to the level of the one or more biomarkers at the second time point; and (d) determining the disease progression between the first and the second time point based on the result of step (c). The one or more biomarkers comprise gene products expressed from genes selected from the group consisting of IL-1α, IL-1β, IL-1ra, IL-3, IL-2, IL-4, IL-5, IL-6, IL-7, IL-8, IL-9, IL-10, IL-12 (p40), IL-12(p70), IL-13, IL-15, IL-17, EGF, Eotaxin, FGF-2, FTL-3 ligand, Fractalkine, G-CSF, GM-CSF, GRO, IFN-α2, IFN-γ, IP-10, MCP-1, MCP-3, MCD, MIP-1α, MIP-1β, PDGF-aa, PGDF-aa bb, RANTES, sCD40L, sIL2-rα, TNF-α, TNF-β, VEGF and genes listed in Tables 4, 5, 6 and 8.

[0015] Another aspect of the present invention relates to a method for determining the efficacy of a treatment for stroke in a subject. The method comprises the steps of (a) measuring the level of one or more biomarkers in a first sample obtained from the subject at a first time point; (b) measuring the level of the one or more biomarkers in a second sample obtained from the subject at a second time point, wherein the subject is under treatment at the second time point; (c) comparing the level of the one or more biomarkers at the first time point to the level of the one or more biomarkers at the second time point; and (d) determining the efficacy of the treatment based on the result of step (c). The one or more biomarkers comprise gene products expressed from genes selected from the group consisting of IL-1α, IL-1β, IL-1ra, IL-3, IL-2, IL-4, IL-5, IL-6, IL-7, IL-8, IL-9, IL-10, IL-12 (p40), IL-12(p70), IL-13, IL-15, IL-17, EGF, Eotaxin, FGF-2, FTL-3 ligand, Fractalkine, G-CSF, GM-CSF, GRO, IFN-α2, IFN-γ, IP-10, MCP-1, MCP-3, MCD, MIP-1α, MIP-1β, PDGF-aa, PGDF-aa bb, RANTES, sCD40L, sIL2-rα, TNF-α, TNF-β, VEGF and genes listed in Tables 4, 5, 6 and 8.

[0016] Another aspect of the present invention relates to a kit for detecting biomarkers for stroke in a biological sample. The kit comprises (a) reagents for detecting a panel of biomarkers for stroke, and (b) a instruction listing the reference range for each of the biomarkers. The panel of biomarkers comprise two or more biomarkers, and wherein the two or more biomarkers comprise gene products expressed from genes selected from the group consisting of IL-1α, IL-1β, IL-1ra, IL-3, IL-2, IL-4, IL-5, IL-6, IL-7, IL-8, IL-9, IL-10, IL-12 (p40), IL-12(p70), IL-13, IL-15, IL-17, EGF, Eotaxin, FGF-2, FTL-3 ligand, Fractalkine, G-CSF, GM-CSF, GRO, IFN-α2, IFN-γ, IP-10, MCP-1, MCP-3, MCD, MIP-1α, MIP-1β, PDGF-aa, PGDF-aa bb, RANTES, sCD40L, sIL2-rα, TNF-α, TNF-β, VEGF, NMDA receptor, neuronal specific enolase, GFAP, Apo C-III, MMP-9, D-dimer, CRP, brain natriuretic peptide, S100B and genes listed in Tables 4, 5, 6 and 8.

### BRIEF DESCRIPTION OF THE DRAWINGS

[0017] FIG. 1 shows diffusion weighted (DWI; FIGS. 1A, 1C) and T2-weighted (FIGS. 1B, 1D) MRI images collected immediately after and 24 hours following middle cerebral artery occlusion (MCAO) in a monkey subject (Monkey A035), increase in infarct size as measured by DWI 24 hours following MCAO (FIG. 1E), and infarct size as measured by DWI correlated with the motor impairment observed in the task-oriented neurological assessment (FIG. 1F).

[0018] FIG. 2 shows microarray analysis of RNA from PBMCs of non-human primates following MCAO. Blood was collected before MCAO (Pre-O) and after ischemia (1, 2 and 24 hours). Green indicates genes with low level or no expression. Red indicates genes induced following ischemia.

[0019] FIG. 3 shows levels of the cytokine monocyte chemotactic protein-1 (MCP-1) in serum increase significantly 1-2 hours after MCAO then return to baseline at 24 hours following stroke using a Luminex assay (FIG. 1A) and a Western blot analysis of serum confirming the Luminex results (FIG. 1b).

[0020] FIG. 4 shows peptidomic analysis of proteins from serum of non-human primates following MCAO. Blood was collected before MCAO (Pre-O) and after ischemia (1, 2 and 24 hours). Green indicates proteins with low level expression. Red indicates proteins increased following ischemia.

### DETAILED DESCRIPTION

[0021] The following detailed description is presented to enable any person skilled in the art to make and use the invention. For purposes of explanation, specific nomenclature is set forth to provide a thorough understanding of the present invention. However, it will be apparent to one skilled in the art that these specific details are not required to practice the invention. Descriptions of specific applications are provided only as representative examples. The present invention is not intended to be limited to the embodiments shown, but is to be accorded the widest possible scope consistent with the principles and features disclosed herein.

[0022] As used herein, the following terms shall have the following meanings:

[0023] A “biomarker,” as used herein, refers to a small molecule, protein, or nucleic acid that can be detected and measured in parts of the body like the blood or tissue whose presence or concentration reflects the presence, severity, type or progression of stroke in a subject. More generally a biomarker is anything that can be used as an indicator of a particular disease state or some other biological state of an organism. In molecular terms biomarker is the subset of markers that might be detected in a subject using genomics, proteomics technologies or imaging technologies. A biomarker may include any of, but is not limited to, a cytokine, chemokine, growth factor, enzyme, or a protein associated with thrombosis. A biomarker can also include a nucleic acid that encodes any of the above proteins or an mRNA or microRNA that is differentially expressed during or following a stroke. A biomarker may be a gene product whose presence is increased following a stroke or whose presence is decreased following a stroke.

[0024] As used herein, the term “gene product” or “expression product of a gene” refers to the transcriptional products of a gene, such as mRNAs and cDNAs encoded by the gene, and/or the translational products of a gene, such as peptides encoded by the gene, and fragments thereof.

[0025] As used herein, the term “antibody” refers to immunoglobulin molecules and immunologically active portions of immunoglobulin (Ig) molecules, i.e., “antigen binding fragments thereof” or molecules that contain an antigen binding site that specifically binds (immunoreacts with) an antigen. The term “antibody” is used in the broadest sense and specifically covers monoclonal antibodies (including full length monoclonal antibodies), polyclonal antibodies, multispecific antibodies (e.g., bispecific antibodies), and antibody fragments so long as they exhibit the desired biological activity. By “specifically bind” or “immunoreacts with” is meant that the antibody reacts with one or more antigenic determinants of the desired antigen and does not react (i.e., bind) with other polypeptides or binds at much lower affinity with other polypeptides. The term “antibody” also includes antibody fragments that comprise a portion of a full length antibody, generally the antigen binding or variable region thereof. Examples of antibody fragments include Fab, Fab′, F(ab′)2, and Fv fragments; diabodies; linear antibodies; single-chain antibody (scFv) molecules; and multispecific antibodies formed from antibody fragments. In certain embodiments of the invention, it may be desirable to use an antibody fragment, rather than an intact antibody, to increase tumor penetration, for example. In this case, it may be desirable to use an antibody fragment that has been modified by any means known in the art in order to increase its serum half life.

[0026] The term “monoclonal antibody” as used herein refers to an antibody obtained from a population of substantially homogeneous antibodies, i.e., the individual antibodies comprising the population are identical except for possible naturally occurring mutations that may be present in minor amounts. The monoclonal antibodies herein specifically include “chimeric” antibodies in which a portion of the heavy and/or light chain is identical with or homologous to corresponding sequences in antibodies derived from a particular species or belonging to a particular antibody class or subclass, while the remainder of the chain(s) is identical with or homologous to corresponding sequences in antibodies derived from another species or belonging to another antibody class or subclass, as well as fragments of such antibodies, so long as they exhibit the desired biological activity (U.S. Pat. No. 4,816,567; and Morrison et al., Proc. Natl. Acad. Sci. USA 81:6851-6855 (1984)).

[0027] The term “biological sample” refers to a sample of biological material obtained from a mammal subject, preferably a human subject, including a tissue, a tissue sample, a cell sample, peripheral blood mononuclear cells, and a biological fluid, e.g., blood, plasma, serum, saliva, urine, cerebral or spinal fluid, and lymph liquid. A biological sample may be obtained in the form of, e.g., a tissue biopsy, such as, an aspiration biopsy, a brush biopsy, a surface biopsy, a needle biopsy, a punch biopsy, an excision biopsy, an open biopsy, an incision biopsy and an endoscopic biopsy. In one embodiment, the biological sample is a blood, serum or plasma sample. In another embodiment, the biological sample is peripheral blood mononuclear cells.

[0028] An “isolate” of a biological sample (e.g., an isolate of a tissue or tumor sample) refers to a material or composition (e.g., a biological material or composition) which has been separated, derived, extracted, purified or isolated from the sample and preferably is substantially free of undesirable compositions and/or impurities or contaminants associated with the biological sample.

[0029] The term “increased level” refers to a level that is higher than a normal or control level customarily defined or used in the relevant art. For example, an increased level of immunostaining in a tissue is a level of immunostaining that would be considered higher than the level of immunostaining in a control tissue by a person of ordinary skill in the art.

[0030] The term “decreased level” refers to a level that is lower than a normal or control level customarily defined or used in the relevant art. For example, a decreased level of immunostaining in a tissue is a level of immunostaining that would be considered lower than the level of immunostaining in a control tissue by a person of ordinary skill in the art.

[0031] Ranges may be expressed herein as from “about” one particular value, and/or to “about” another particular value. When such a range is expressed, another embodiment includes from the one particular value and/or to the other particular value. Similarly, when values are expressed as approximations, by use of the antecedent “about,” it will be understood that the particular value forms another embodiment. It will be further understood that the endpoints of each of the ranges are significant both in relation to the other endpoint, and independently of the other endpoint. It is also understood that there are a number of values disclosed herein, and that each value is also herein disclosed as “about” that particular value in addition to the value itself. For example, if the value “10” is disclosed, then “about 10” is also disclosed. It is also understood that when a value is disclosed that “less than or equal to” the value, “greater than or equal to the value” and possible ranges between values are also disclosed, as appropriately understood by the skilled artisan. For example, if the value “10” is disclosed the “less than or equal to 10” as well as “greater than or equal to 10” is also disclosed.

[0032] The term “expression level of a stroke biomarker” may be measured at the transcription level, in which case the presence and/or the amount of a polynucleotide is determined, or at the translation level, in which case the presence and/or the amount of a polypeptide is determined. Stroke biomarker expression may be characterized using any suitable method.

[0033] One aspect of the present invention relates to a method for diagnosing stroke in a subject. One aspect of the present invention relates to a method for diagnosing stroke in a subject. The method comprises the steps of (a) measuring the level of one or more biomarkers in a sample from the subject; (b) comparing the level of the one or more biomarkers to a reference level of the one or more biomarkers; and (c) making a diagnosis based on the result of the comparing step.

[0034] In one embodiment, the stroke biomarker level in the biological sample is compared with a stroke marker level associated with a reference sample, such as a normal control sample. The phrase “normal control level” refers to the level of a stroke biomarker typically found in a biological sample of a population not suffering from stroke. The reference sample is preferably of a similar nature to that of the test sample. For example, if the test sample comprises patient serum, the reference sample should also be serum. The stroke biomarker level in the biological samples from control and test subjects may be determined at the same time or, alternatively, the normal control level may be determined by a statistical method based on the results obtained by analyzing the level of the stroke biomarker in samples previously collected from a control group.

[0035] In one embodiment, biomarkers are gene products expressed from genes selected from the group consisting of IL-1α, IL-1β, IL-1ra, IL-3, IL-2, IL-4, IL-5, IL-6, IL-7, IL-8, IL-9, IL-10, IL-12 (p40), IL-12(p70), IL-13, IL-15, IL-17, EGF, Eotaxin, FGF-2, FTL-3 ligand, Fractalkine, G-CSF, GM-CSF, GRO, IFN-α2, IFN-γ, IP-10, MCP-1, MCP-3, MCD, MIP-1α, MIP-1β, PDGF-aa, PGDF-aa bb, RANTES, sCD40L, sIL2-rα, TNF-α, TNF-β, VEGF, NMDA receptor, neuronal specific enolase, GFAP, Apo C-III, MMP-9, D-dimer, CRP, brain natriuretic peptide, S100B and genes listed in Tables 4, 5, 6 and 8.

[0036] In a related embodiment, the biomarkers are expression products of cytokine genes, chemokine genes or growth factor genes. In a further related embodiment, the cytokine, chemokine or growth factor genes are selected from genes encoding IL-1α, IL-1β, IL-1ra, IL-2, IL-3, IL-4, IL-5, IL-6, IL-7, IL-8, IL-9, IL-10, IL-12 (p40), IL-12 (p70), IL-13, IL-15, IL-17, epidermal growth factor (EGF), Eotaxin, FGF-2, FTL-3 ligand, Fractalkine, G-CSF, GM-CSF, GRO, IFN-α2, IFN-γ, IP-10, monocyte chemotactic protein-1 (MCP-1), MCP-3, MCD, MIP-1α, MIP-1β, PDGF-aa, PDGF-aa bb, RANTES, sCD40L, sIL2-rα, TNF-α, TNF-β, and VEGF.

[0037] In certain embodiments, the biomarkers are protein or peptide markers.

[0038] In certain other embodiments, the biomarkers are nucleic acid biomarkers. In certain related embodiments, the nucleic acid biomarkers are DNA or RNA biomarkers. In certain embodiments, expression of the stroke biomarkers is determined at the mRNA level by quantitative RT-PCR, Northern blot or other methods known to a person of ordinary skill in the art.

[0039] In some embodiments, a panel of multiple biomarkers is measured in step (a). Multimarker panels improve the diagnostic sensitivity and specificity of individual biomarkers. For example, by simultaneously targeting different components of the ischemic cascade, a panel of biomarkers can distinguish patients with acute stroke from age and gender-matched control subjects and establish the timing and severity of the stroke. In some embodiments, multimarker panels include biomarkers that indicate stroke incidence, timing after ischemia and severity of neuronal damage. In other embodiments, the panels would also include markers to confirm or rule out hemorrhage and transient ischemic attack (e.g. irreversible neuronal damage).

[0040] In other embodiments, step (a) includes measuring a panel of three or more biomarkers in the sample from the subject. In certain embodiments, the panel comprises at least one immediate early stroke biomarker (diferentially expressed at 1 hour post-stroke), at least one early stroke biomarker (diferentially expressed at 2 hour post-stroke) and at least one late stroke biomarker (diferentially expressed at 24 hour post-stroke). In certain other embodiments, the panel comprises at least two immediate early stroke biomarker (diferentially expressed at 1 hour post-stroke), at least two early stroke biomarker (diferentially expressed at 2 hour post-stroke) and at least two late stroke biomarker (diferentially expressed at 24 hour post-stroke). In certain other embodiments, the panel comprises at least three immediate early stroke biomarker (diferentially expressed at 1 hour post-stroke), at least three early stroke biomarker (diferentially expressed at 2 hour post-stroke) and at least three late stroke biomarker (diferentially expressed at 24 hour post-stroke).

[0041] Examples of immediate early stroke biomarkers include, but are not limited to, gene products of CD163, PKC delta, pyruvate kinase, muscle (PKM2), thyroid hormone receptor associated protein 2, thyroid hormone receptor associated protein 5, nod-like receptor (NLR) family, pyrin domain containing 1, pancreatic ribonuclease (Rnase 1), cytochrome b-245, beta polypeptide, MCP-1, as well as the genes listed in Table 4.

[0042] Examples of early stroke biomarkers include, but are not limited to, gene products of CD163, PKC delta, AKT1 substrate 1 (proline-rich) isoform 1, Cmtm3, WD repeat 19 (WDR19), alpha-2 type IX collagen, thyroid hormone receptor associated protein 2, thyroid hormone receptor associated protein 5, nod-like receptor (NLR) family, pyrin domain containing 1, pancreatic ribonuclease (Rnase 1), complement factor H isoform a precursor, MCP-1, as well as the genes listed in Table 5.

[0043] Examples of late stroke biomarkers include, but are not limited to, gene products of NODS (NLRX1), aspartyl-tRNAsynthetase, lymphocyte cytosolic protein 1 (L-plastin), chitinase 1 (chitotriosidase), proteasome subunit alpha type 1(PSMA4), PKC delta, Cmtm3, WDR19, alpha-2 type IX collagen, PKM2, thyroid hormone receptor associated protein 2, thyroid hormone receptor associated protein 5, nod-like receptor family, pyrin domain containing 1, pancreatic ribonuclease (Rnase 1), cytochrome b-245, beta polypeptide, complement factor H isoform a precursor, as well as the genes listed in Table 6.

[0044] In certain embodiments, the biomarker panel further comprises comprises one or more stroke incidence biomarkers that can only be detected in blood after stroke. Examples of such biomarkers include, but are not limited to, alpha-2-plasmin inhibitor, WDR19, alpha-2 type IX collagen, PKM2, thyroid hormone receptor associated protein 2, thyroid hormone receptor associated protein 5, nod-like receptor family, pyrin domain containing 1 pancreatic ribonuclease (Rnase 1), and cytochrome b-245, beta polypeptide S100-B.

[0045] In certain other embodiments, the biomarker panel further comprises one or more stroke severity biomarkers whose levels increase in blood over time after stroke. Examples of such biomarkers include, but are not limited to, PKC delta, chemokine-like superfamily 3 (Cmtm3), and NLR family, pyrin domain containing 1.

[0046] In other embodiments, the above-described biomarker panel may further comprise one or more neuronal injury markers, such as gene products of NMDA receptor and neuronal specific enolase.

[0047] In other embodiments, the above-described biomarker panel may further comprise one or more emorrhagic stroke markers, such as GFAP, Apo C-III and MMP-9.

[0048] In other embodiments, the above-described biomarker panel may further comprise one or more biomarkes selected from the group consisting of D-dimer, CRP, brain natriuretic peptide (BNP) and S1000B.

[0049] In other embodiments, the biomarker panel comprises at least one expression product from the genes listed in Table 4, at least one expression product from the genes listed in Table 5 and at least one expression product from the genes listed in Table 6. In other embodiments, the biomarker panel comprises at least three expression product from the genes listed in Table 4, at least three expression product from the genes listed in Table 5 and at least three expression product from the genes listed in Table 6. In other embodiments, the biomarker panel comprises at least five expression product from the genes listed in Table 4, at least five expression product from the genes listed in Table 5 and at least five expression product from the genes listed in Table 6. These biomarker panels may further include expression products from the stroke severity biomarkers, neuronal injury markers, and emorrhagic stroke markers.

[0050] In some embodiments, the biomarkers and biomarker panels are specific for ischemic stroke. In related embodiments, the ischemic stroke is large vessel ischemic stroke.

[0051] In another embodiment, the biomarkers are detected in a tissue sample.

[0052] In certain other embodiments, the biomarkers are detected in a body fluid. As used hereinafter, the term “body fluid” refers to blood, blood plasma or serum, urine, saliva and cerebrospinal fluid. In a related embodiment, the biomarkers are detected in cells obtained from a body fluid, for example, peripheral blood mononuclear cells isolated from a blood sample.

[0053] In another embodiment, the measuring step includes measuring two or more biomarkers in the sample from the subject.

[0054] In another embodiment, the measuring step includes measuring three or more biomarkers in the sample from the subject.

[0055] In another embodiment, the measuring step includes measuring four or more biomarkers in the sample from the subject.

[0056] In another embodiment, the measuring step includes measuring five, 10, 15, 20, 25 or more biomarkers in the sample from the subject.

[0057] Another aspect of the present invention is a method for determining disease progression in a subject after a stroke. The method comprises the steps of (a) measuring the level of one or more biomarkers in a sample from the subject receiving the treatment and (b) determining the disease progression based on the level of the one or more biomarkers in the sample.

[0058] Another aspect of the present invention relates to a method for determining disease progression in a subject after a stroke. The method comprises the steps of (a) measuring the level of one or more biomarkers in a first sample obtained from the subject at a first time point; (b) measuring the level of the one or more biomarkers in a second sample obtained from the subject at a second time point; (c) comparing the level of the one or more biomarkers at the first time point to the level of the one or more biomarkers at the second time point; and (d) determining the disease progression between the first and the second time point based on the result of step (c).

[0059] Another aspect of the present invention relates to a method for determining the efficacy of a treatment for stroke in a subject. The method comprises the steps of (a) measuring the level of one or more biomarkers in a first sample obtained from the subject at a first time point; (b) measuring the level of the one or more biomarkers in a second sample obtained from the subject at a second time point, wherein the subject is under treatment at the second time point; (c) comparing the level of the one or more biomarkers at the first time point to the level of the one or more biomarkers at the second time point; and (d) determining the efficacy of the treatment based on the result of step (c).

### Detection of Biomarkers for Stroke in a Subject

[0060] Methods for detecting stroke biomarkers in a tissue or body fluid sample have many applications. For example, one or more biomarkers can be measured to aid in the diagnosis of stroke. In another example, the methods for detection of the biomarkers can be used to determine the severity of a stroke. In another example, the methods for detection of the biomarkers can be used to determine the time elapsed following the occurrence of a stroke. In another example, the methods for detection of the biomarkers can be used to determine what type of stroke a subject experienced. For example, differences in the types of stroke biomarkers, and/or the quantity of a particular biomarker in the subject may elucidate whether the subject experienced a hemorrhagic stroke or an ischemic stroke, or whether an ischemic stroke was a large vessel ischemic stroke. In yet another example, the methods for detecting markers can be used to monitor the progression of stroke in a subject. In still another example, the methods for detection of the biomarkers can be used to monitor a subject's response to treatment or to determine the type of treatment that should be used for that subject. In still another example, biomarkers can be used to detect whether a subject has experienced transient ischemia, such as that associated with a reperfusion injury. In a further example, biomarkers can elucidate whether a subject has experienced a permanent stroke or a transient stroke. In another example, biomarkers can be used to assess the effectiveness of a neuroprotective drug or compound.

[0061] In order to detect stroke biomarkers in a subject, a cerebrospinal fluid, blood or serum sample is contacted with at least one antibody specific for a biomarker for stroke. Alternatively, a sample can be obtained by lysing the PBMCs by methods known in the art and contacting the lysate with at least one antibody specific for a biomarker for stroke. In addition, biomarkers may also be detected in saliva, urine, tears, and specific subsets of leukocytes, such as B lymphocytes, T lymphocytes, granulocytes (such as neutrophils), and monocytes.

[0062] Exemplary biomarkers for stroke include gene products expressed from genes selected from the group consisting of IL-1α, IL-1β, IL-1ra, IL-3, IL-2, IL-4, IL-5, IL-6, IL-7, IL-8, IL-9, IL-10, IL-12 (p40), IL-12(p70), IL-13, IL-15, IL-17, EGF, Eotaxin, FGF-2, FTL-3 ligand, Fractalkine, G-CSF, GM-CSF, GRO, IFN-α2, IFN-γ, IP-10, MCP-1, MCP-3, MCD, MIP-1α, MIP-1β, PDGF-aa, PGDF-aa bb, RANTES, sCD40L, sIL2-rα, TNF-α, TNF-β, VEGF and genes listed in Tables 4, 5, 6 and 8.

[0063] Stroke biomarkers can be detected and/or quantified using any of suitable immunological binding assays known in the art. Useful assays include, for example, an enzyme immune assay (EIA) such as enzyme-linked immunosorbent assay (ELISA), a radioimmunoassay (MA), a Western blot assay, a slot blot assay or a dipstick assay.

[0064] Generally, a sample from a subject can be contacted with an antibody that specifically binds a stroke biomarker. Optionally, the antibody can be fixed to a solid support to facilitate washing and subsequent isolation of the complex, prior to contacting the antibody with a sample. Examples of solid supports include glass or plastic in the form of a microtiter plate, a stick, a bead, or a microbead. Examples of solid supports encompassed herein include those formed partially or entirely of glass (e.g., controlled pore glass), polysaccharides (e.g., agarose), polyacrylamides, silicones, and plastics such as polystyrene, polypropylene and polyvinyl alcohol. The sample can be diluted with a suitable diluant or eluant before contacting the sample to the antibody.

[0065] After incubating the sample with antibodies, the mixture is washed and the antibody-biomarker complex formed can be detected. This can be accomplished by incubating the washed mixture with a detection reagent. This detection reagent may be a second antibody which is labeled with a detectable label, for example. Exemplary detectable labels include magnetic beads (e.g., DYNABEADS™), fluorescent dyes, radiolabels, enzymes (for example, horse radish peroxidase, alkaline phosphatase and others commonly used in an ELISA), and colorimetric labels such as colloidal gold or colored glass or plastic beads. Alternatively, the biomarker in the sample can be detected using an indirect assay, wherein, for example, a second, labeled antibody is used to detect bound biomarker-specific antibody, and/or in a competition or inhibition assay wherein, for example, a monoclonal antibody which binds to a distinct epitope of the marker is incubated simultaneously with the mixture.

[0066] Immunoassays can be used to determine presence or absence of a stroke biomarker in a sample as well as the quantity of a biomarker in a sample. First, a test amount of a biomarker in a sample can be detected using the immunoassay methods described above. If a marker is present in the sample, it will form an antibody-marker complex with an antibody that specifically binds the marker under suitable incubation conditions described above. The amount of an antibody-marker complex can be determined by comparing to a standard. A standard can be a known compound or another protein known to be present in a sample, for example. As noted above, the test amount of marker need not be measured in absolute units, as long as the unit of measurement can be compared to a control.

### Enzyme-Linked Immunosorbent Assay (ELISA)

[0067] In certain embodiments, the stroke biomarkers are detected using enzyme-linked immunosorbent assay (ELISA) which is typically carried out using antibody coated assay plate or wells. Commonly used ELISA assay employs either a sandwich immunoassay or a competitive binding immunoassay.

[0068] Briefly, a sandwich immunoassay is a method using two antibodies, which bind to different sites on the antigen or ligand. The primary antibody, which is highly specific for the antigen, is attached to a solid surface. The antigen is then added followed by addition of a second antibody referred to as the detection antibody. The detection antibody binds the antigen to a different epitope than the primary antibody. As a result the antigen is ‘sandwiched’ between the two antibodies. The antibody binding affinity for the antigen is usually the main determinant of immunoassay sensitivity. As the antigen concentration increases the amount of detection antibody increases leading to a higher measured response. The standard curve of a sandwich-binding assay has a positive slope. To quantify the extent of binding different reporters can be used. Typically an enzyme is attached to the secondary antibody which must be generated in a different species than primary antibodies (i.e. if the primary antibody is a rabbit antibody than the secondary antibody would be an anti-rabbit from goat, chicken, etc., but not rabbit). The substrate for the enzyme is added to the reaction that forms a colorimetric readout as the detection signal. The signal generated is proportional to the amount of target antigen present in the sample.

[0069] The antibody linked reporter used to measure the binding event determines the detection mode. A spectrophotometric plate reader may be used for colorimetric detection. Several types of reporters have been developed in order to increase sensitivity in an immunoassay. For example, chemiluminescent substrates have been developed which further amplify the signal and can be read on a luminescent plate reader. Also, a fluorescent readout where the enzyme step of the assay is replaced with a fluorophor tagged antibody is becoming quite popular. This readout is then measured using a fluorescent plate reader.

[0070] A competitive binding assay is based upon the competition of labeled and unlabeled ligand for a limited number of antibody binding sites. Competitive inhibition assays are often used to measure small analytes. These assays are also used when a matched pair of antibodies to the analyte does not exist. Only one antibody is used in a competitive binding ELISA. This is due to the steric hindrance that occurs if two antibodies would attempt to bind to a very small molecule. A fixed amount of labeled ligand (tracer) and a variable amount of unlabeled ligand are incubated with the antibody. According to law of mass action the amount of labeled ligand is a function of the total concentration of labeled and unlabeled ligand. As the concentration of unlabeled ligand is increased, less labeled ligand can bind to the antibody and the measured response decreases. Thus the lower the signal, the more unlabeled analyte there is in the sample. The standard curve of a competitive binding assay has a negative slope.

### Microbeads

[0071] In certain other embodiments, the stroke biomarkers are detected using antibody coated microbeads. In some embodiments, the microbeads are magnetic beads. In other embodiments, the beads are internally color-coded with fluorescent dyes and the surface of the bead is tagged with an anti-stroke biomarker antibody that can bind a stroke biomarker in a test sample. The stroke biomarker, in turn, is either directly labeled with a fluorescent tag or indirectly labeled with an anti-marker antibody conjugated to a fluorescent tag. Hence, there are two sources of color, one from the bead and the other from the fluorescent tag. Alternatively, the beads can be internally coded by different sizes.

[0072] By using a blend of different fluorescent intensities from the two dyes, as well as beads of different sizes, the assay can measure up to hundreds of different stroke biomarkers. During the assay, a mixture containing the color/size-coded beads, fluorescence labeled anti-marker antibodies, and the sample are combined and injected into an instrument that uses precision fluidics to align the beads. The beads then pass through a laser and, on the basis of their color or size, either get sorted or measured for color intensity, which is processed into quantitative data for each reaction.

[0073] When samples are directly labeled with fluorophores, the system can read and quantitate only fluorescence on beads without removing unbound fluorophores in solution. The assays can be multiplexed by differentiating various colored or sized beads. Real time measurement is achievable when a sample is directly required for unlabeled samples. Standard assay steps include incubation of a sample with anti-marker antibody coated beads, incubation with biotin or fluorophore-labeled secondary antibody, and detection of fluorescence signals. Fluorescent signals can be developed on bead (by adding streptavidin-fluorophore conjugates for biotinylated secondary antibody) and read out by a bead analyzer. Depending on the anti-marker immobilized on the bead surface, a bead-based immunoassay can be a sandwich type or a competitive type immunoassay.

### Test Stick

[0074] In some other embodiments, the stroke biomarkers in a liquid biosample are detected using a test stick or dip stick. The test stick typically contains a fluid impermeable housing and a fluid permeable “stick” having one or more detection zones. In one embodiment, each detection zone contains a dried binding reagent that binds to a stroke biomarker in a biosample. In another embodiment, the dried binding reagent is a labeled binding reagent. In another embodiment, the test stick may further comprise a control zone to indicate that the assay test has been carried out satisfactorily, namely the reagents were present in the test stick and that they become mobilized during running the test and have been transported along the flow path. The control zone can also indicate that the reagents within the device are capable of immunochemical interactions, confirming the chemical integrity of the device. This is important when considering the storage and shipment of the device under desiccated conditions within a certain temperature range. The control zone is typically positioned downstream from the detection zone(s) and may, for example, comprise an immobilized binding reagent for a labeled binding reagent. The labeled binding reagent may be present in a mobilizable form upstream from the control zone and detection zone. The labeled binding reagent may be the same or different to the labeled binding reagent for the stroke biomarker.

[0075] In one embodiment, the test stick comprise a porous sample receiver in fluid connection with and upstream from one or more flow-paths. The porous sample receiver may be common to all assays. Thus a fluid sample applied to the common sample application region of the device is able to travel along the one or more flow-paths to the respective detection zones. The porous sample receiver may be provided within a housing or may at least partially extend out of said housing and may serve for example to collect a body fluid. The porous sample receiver may also act as a fluid reservoir. The porous sample receiving member can be made from any bibulous, porous or fibrous material capable of absorbing liquid rapidly. The porosity of the material can be unidirectional (i.e. with pores or fibers running wholly or predominantly parallel to an axis of the member) or multidirectional (omnidirectional, so that the member has an amorphous sponge-like structure). Porous plastics material, such as polypropylene, polyethylene (preferably of very high molecular weight), polyvinylidene fluoride, ethylene vinylacetate, acrylonitrile and polytetrafluoro-ethylene can be used. Other suitable materials include glass-fiber.

[0076] If desired, an absorbent “sink” can be provided at the distal end of the carrier material. The absorbent sink may comprise, for example, Whatman 3MM chromatography paper, and should provide sufficient absorptive capacity to allow any unbound labeled binding reagent to wash out of the detection zone(s). As an alternative to such a sink it can be sufficient to have a length of porous solid phase material which extends beyond the detection zone(s).

[0077] Following the application of a binding reagent to a detection zone, the remainder of the porous solid phase material may be treated to block any remaining binding sites. Blocking can be achieved by treatment for example with protein (e.g. bovine serum albumin or milk protein), or with polyvinyl alcohol or ethanolamine, or combinations thereof. To assist the free mobility of the labeled binding reagent when the porous carrier is moistened with the sample, the porous carrier may further comprise a sugar such as sucrose or lactose and/or other substances, such as polyvinyl alcohol (PVA) or polyvinyl pyrrolidone (PVP). Such material may be deposited, for example, as an aqueous solution in the region to which the labeled binding reagent is to be applied. Such materials could be applied to the porous carrier as a first application followed by the application of the label; alternatively, such materials could be mixed with the label and applied to the porous carrier or combinations of both. Such material may be deposited upstream from or at the labeled binding reagent.

[0078] Alternatively, the porous carrier may not be blocked at the point of manufacture; instead the means for blocking the porous carrier are included in a material upstream from the porous carrier. On wetting the test strip, the means for blocking the porous carrier are mobilized and the blocking means flow into and through the porous carrier, blocking as the flow progresses. The blocking means include proteins such as BSA and casein as well as polymers such as PVP, PVA as well as sugars and detergents such as Triton-X100. The blocking means could be present in the macroporous carrier material.

[0079] The dried binding reagents may be provided on a porous carrier material provided upstream from a porous carrier material comprising the detection zone. The upstream porous carrier material may be macroporous. The macroporous carrier material should be low or non-protein-binding, or should be easily blockable by means of reagents such as BSA or PVA, to minimize non-specific binding and to facilitate free movement of the labeled reagent after the macroporous body has become moistened with the liquid sample. The macroporous carrier material can be pre-treated with a surface active agent or solvent, if necessary, to render it more hydrophilic and to promote rapid uptake of the liquid sample. Suitable materials for a macroporous carrier include plastic materials such as polyethylene and polypropylene, or other materials such as paper or glass-fiber. In the case that the labeled binding reagent is labeled with a detectable particle, the macroporous body may have a pore size at least ten times greater than the maximum particle size of the particle label. Larger pore sizes give better release of the labeled reagent. As an alternative to a macroporous carrier, the labeled binding reagent may be provided on a non-porous substrate provided upstream from the detection zone, said non-porous substrate forming part of the flow-path.

[0080] In another embodiment, the test stick may further comprise a sample receiving member for receiving the fluid sample. The sample receiving member may extend from the housing.

[0081] The housing may be constructed of a fluid impermeable material. The housing will also desirably exclude ambient light. The housing will be considered to substantially exclude ambient light if less than 10%, preferably less than 5%, and most preferably less than 1%, of the visible light incident upon the exterior of the device penetrates to the interior of the device. A light-impermeable synthetic plastics material such as polycarbonate, ABS, polystyrene, polystyrol, high density polyethylene, or polypropylene containing an appropriate light-blocking pigment is a suitable choice for use in fabrication of the housing. An aperture may be provided on the exterior of the housing which communicates with the assay provided within the interior space within the housing. Alternatively, the aperture may serve to allow a porous sample receiver to extend from the housing to a position external from the housing.

### Microarray

[0082] In other embodiments, the stroke biomarkers are detected by a protein microarray containing immobilized stroke biomarker-specific antibodies on its surface. The microarray can be used in a “sandwich” assay in which the antibody on the microarray captures a stroke biomarker in the test sample and the captured marker is detected by a labeled secondary antibody that specifically binds to the captured marker. In a preferred embodiment, the secondary antibody is biotinylated or enzyme-labeled. The detection is achieved by subsequent incubation with a streptavidin-fluorophore conjugate (for fluorescence detection) or an enzyme substrate (for colorimetric detection).

[0083] Typically, a microarray assay contains multiple incubation steps, including incubation with the samples and incubation with various reagents (e.g., primary antibodies, secondary antibodies, reporting reagents, etc.). Repeated washes are also needed between the incubation steps. In one embodiment, the microarray assays is performed in a fast assay mode that requires only one or two incubations. It is also conceivable that the formation of a detectable immune complex (e.g., a captured stroke biomarker/anti-marker antibody/label complex) may be achieved in a single incubation step by exposing the protein microarray to a mixture of the sample and all the necessary reagents. In one embodiment, the primary and secondary antibodies are the same antibody.

[0084] In another embodiment, the protein microarray provides a competitive immunoassay. Briefly, a microarray comprising immobilized anti-marker antibodies is incubated with a test sample in the presence of a labeled stroke biomarker standard. The labeled stroke biomarker competes with the unlabeled stroke biomarker in the test sample for the binding to the immobilized antigen-specific antibody. In such a competitive setting, an increased concentration of the specific stroke biomarker in the test sample would lead to a decreased binding of the labeled stroke biomarker standard to the immobilized antibody and hence a reduced signal intensity from the label.

[0085] The microarray can be processed in manual, semi-automatic or automatic modes. Manual mode refers to manual operations for all assay steps including reagent and sample delivery onto microarrays, sample incubation and microarray washing. Semi-automatic modes refer to manual operation for sample and reagent delivery onto microarray, while incubation and washing steps operate automatically. In an automatic mode, three steps (sample/reagent delivery, incubation and washing) can be controlled by a computer or an integrated breadboard unit with a keypad. For example, the microarray can be processed with a ProteinArray Workstation (PerkinElmer Life Sciences, Boston, Mass.) or Assay 1200™. Workstation (Zyomyx, Hayward, Calif.). Scanners by fluorescence, colorimetric and chemiluminescence, can be used to detect microarray signals and capture microarray images. Quantitation of microarray-based assays can also be achieved by other means, such as mass spectrometry and surface plasma resonance. Captured microarray images can be analyzed by stand-alone image analysis software or with image acquisition and analysis software package. For example, quantification of an antigen microarray can be achieved with a fluorescent PMT-based scanner—ScanArray 3000 (General Scanning, Watertown, Mass.) or colorimetric CCD-based scanner—VisionSpot (Allied Biotech, Ijamsville, Md.). Typically, the image analysis would include data acquisition and preparation of assay report with separate software packages. To speed up the whole assay process from capturing an image to generating an assay report, all the analytical steps including image capture, image analysis, and report generation, can be confined in and/or controlled by one software package. Such an unified control system would provide the image analysis and the generation of assay report in a user-friendly manner.

### Implantable Biosensors

[0086] In at-risk subjects, the stroke biomarkers may be detected using implantable biosensors. Biosensors are electronic devices that produce electronic signals as the result of biological interactions. In one embodiment, the biosensors use antibodies, receptors, nucleic acids, or other members of a binding pair to bind with a stroke biomarker, which is typically the other member of the binding pair. Biosensors may be used with a blood sample to determine the presence of a stroke biomarker without the need for sample preparation and/or separation steps typically required for the automated immunoassay systems.

[0087] In one embodiment, the sensor is a nanoscale device. The sensor system includes a biological recognition element attached to a nanowire and a detector that is capable of determining a property associated with the nanowire. The biological recognition element is one member of a binding pair (e.g., a receptor of the stroke biomarker or an anti-stroke biomarker antibody) where the stroke biomarker being measured is the other member of the binding pair. Preferably, the nanowire sensor includes a semiconductor nanowire with an exterior surface formed thereon to form a gate electrode and a first end in electrical contact with a conductor to form a source electrode and a second end in contact with a conductor to form a drain electrode. In one embodiment the sensor is a field effect transistor comprising a substrate formed of an insulating material, a source electrode, a drain electrode and a semiconductor nanowire disposed there between with a biological recognition element attached on a surface of the nanowire. When a binding event occurs between the biological recognition element and its specific binding partner, a detectable change is caused in a current-voltage characteristic of the field effect transistor.

[0088] In another embodiment, the sensor system includes an array of sensors. One or more of the sensors in the array is associated with a protective member that prevents the associated sensor from interacting with the surrounding environment. At a selected time, the protective member may be disabled, thereby allowing the sensor to begin operating to interact with the surrounding fluid or tissue so that the biological recognition element can interact with the other member of its binding pair if that pair member is present.

[0089] In another embodiment, the protective member is formed of a conductive material that can oxidize, is biocompatible, bio-absorbable, and that may be dissolved in solution such as blood upon application of an electric potential. For example, a sensor may be formed within a well of a substrate that is capped by a conductive material such as a biocompatible metal or an electrically-erodible polymer. In another embodiment, the protective member is formed using a material that dissolves over a predetermined period of time. Implantable biosensors are described in, for example, US Patent Application Publication No. 20050049472, which is incorporated herein by reference.

### Determination of Standard Value, Specificity and Sensitivity

[0090] In the present invention, the standard expression level of a stroke biomarker, such as the concentration of a stroke biomarker in a biological sample, can be determined statistically. For example, the concentration of a stroke biomarker in a biological sample in healthy individuals can be measured to determine the standard concentration of said stroke biomarker statistically. When a statistically sufficient population can be gathered, a value in the range of twice or three times the standard deviation (S.D.) from the mean value is often used as the standard value. Therefore, values corresponding to the mean value+2×S.D. or mean value+3×S.D. may be used as standard values. The standard values set as described theoretically comprise 90% and 99.7% of healthy individuals, respectively.

[0091] Alternatively, standard values can also be set based on the actual expression level (e.g., blood concentration of a stroke biomarker) in stroke patients. Generally, standard values set this way minimize the percentage of false positives, and are selected from a range of values satisfying conditions that can maximize detection sensitivity. Herein, the percentage of false positives refers to a percentage, among healthy individuals, of patients whose concentration of a stroke biomarker in a biological sample is judged to be higher or lower than a standard value. On the contrary, the percentage, among healthy individuals, of patients whose concentration of said stroke biomarker in a biological sample is judged to be lower or higher, respectively, than a standard value indicates specificity. That is, the sum of the false positive percentage and the specificity is always 1. The detection sensitivity refers to the percentage of patients whose concentration of a stroke biomarker in a biological sample is judged to deviate from a standard value, among all stroke patients within a population of individuals for whom the presence of stroke has been determined.

[0092] As used herein, the term “test sensitivity” is the ability of a screening test to identify stroke, also characterized by being a test with high sensitivity has few false negatives, additionally a test independent of stroke prevalence. The test sensitivity is calculated as true positive tests per total affected patients tested, expressed as a percentage. Test specificity” refers to a screening test which is correctly negative in the absence of stroke, has high specificity and few false positives, is independent of stroke prevalence. The test specificity is calculated as true negative tests per unaffected individuals tested, expressed as a percentage.

[0093] The term “PPV” (Positive Predictive Value) is the percent of patients with a positive test having had a stroke, and thus assesses reliability of positive test. Calculation:

PPV=(True positive)/(True+False positives). 1.

[0094] The term “NPV” (Negative Predictive Value) refers to patients with negative test that have not had a stroke, and assesses reliability of negative test. Calculation:

NPV=(True negative)/(true and false negatives). 2.

[0095] As the relationship shown above indicates, each of the values for sensitivity, specificity, positive predictive value, and negative predictive value, which are indexes for evaluating the diagnostic accuracy, varies depending on the standard value for judging the level of the concentration of a stroke biomarker in a biological sample.

[0096] A standard value is usually set such that the false positive ratio is low and the sensitivity is high. However, as also apparent from the relationship shown above, there is a trade-off between the false positive ratio and sensitivity. That is, if the standard value is decreased, the detection sensitivity increases. However, since the false positive ratio also increases, it is difficult to satisfy the conditions to have a low false positive ratio. Considering this situation, for example, values that give the following predicted results may be selected as the preferable standard values in the present invention: (1) standard values for which the false positive ratio is 50% or less (that is, standard values for which the specificity is not less than 50%) and (2) standard values for which the sensitivity is not less than 20%.

[0097] The standard values can be set using receiver operating characteristic (ROC) curve. An ROC curve is a graph that shows the detection sensitivity on the vertical axis and the false positive ratio on the horizontal axis. A ROC curve can be obtained by plotting the changes in the sensitivity and the false positive ratio, which were obtained after continuously varying the standard value for determining the high/low degree of the concentration of a stroke biomarker in a biological sample.

[0098] The “standard value” for obtaining the ROC curve is a value temporarily used for the statistical analyses. The standard value for obtaining the ROC curve can generally be continuously varied within a range that allows to cover all selectable standard values. For example, the standard value can be varied between the smallest and largest measured stroke biomarker values in biological samples from an analyzed population.

[0099] Based on the obtained ROC curve, a preferable standard value to be used in the present invention can be selected from a range that satisfies the above-mentioned conditions. Alternatively, a standard value can be selected based on a ROC curve produced by varying the standard values from a range that comprises most of the measured stroke biomarker level in a biological sample.

### Kits

[0100] In yet another aspect, the invention provides kits for detecting the stroke biomarkers of the present invention. For example, the kits may contain reagents for the detection of one or more biomarkers and a list of reference levels of the one or more biomarkers.

[0101] In certain embodiments, the biomarker are gene products expressed from genes selected from the group consisting of IL-1α, IL-1β, IL-1ra, IL-3, IL-2, IL-4, IL-5, IL-6, IL-7, IL-8, IL-9, IL-10, IL-12 (p40), IL-12(p70), IL-13, IL-15, IL-17, EGF, Eotaxin, FGF-2, FTL-3 ligand, Fractalkine, G-CSF, GM-CSF, GRO, IFN-α2, IFN-γ, IP-10, MCP-1, MCP-3, MCD, MIP-1α, MIP-1β, PDGF-aa, PGDF-aa bb, RANTES, sCD40L, sIL2-rα, TNF-α, VEGF and genes listed in Tables 4, 5, 6 and 8.

[0102] In other embodiments, the kit comprises reagents for the detection of a biomarker panel. In certain embodiments, the biomarker panel comprises two or more biomarkers. In certain other embodiments, the biomarker panel comprises five or more biomarkers. In certain other embodiments, the biomarker panel comprises ten or more biomarkers. In certain other embodiments, the biomarker panel comprises twenty or more biomarkers.

[0103] The kits of the invention have many applications. For example, the kits can be used to diagnose whether a subject has had a stroke, how severe that stroke was, and how long ago the subject had the stroke. In another example, the kits can be used to determine what type of stroke a subject experienced. For example, differences in the types of stroke biomarkers, and/or the quantity of a particular biomarker in the subject may elucidate whether the subject experienced a hemorrhagic stroke or an ischemic stroke, or whether an ischemic stroke was a large vessel ischemic stroke. In still another example, the kit can be used to monitor the progression of stroke in a subject or a subject's response to treatment or to determine the type of treatment that should be used for that subject.

[0104] In one embodiment, a kit comprises (a) an antibody that specifically binds to a stroke biomarker; and (b) a detection reagent. Such kits can be prepared from the materials described above, and the previous discussion regarding the materials (e.g., antibodies, detection reagents, immobilized supports, etc.) is fully applicable to this. In a specific embodiment, the antibody is a monoclonal antibody. The detecting means of the kit may include a second, labeled monoclonal antibody. Alternatively, or in addition, the detecting means may include a labeled, competing antigen. In some embodiments, the kit may further comprise instructions for suitable operation parameters in the form of a label or a separate insert.

[0105] Optionally, the kit may further comprise a standard or control information so that the test sample can be compared with the control information standard to determine if the test amount of a marker detected in a sample is a diagnostic amount consistent with a diagnosis of stroke in general, the type of stroke, degree of severity of the stroke, time elapsed since the occurrence of the stroke, progression of the stroke, and/or effect of treatment on the subject.

[0106] Optionally, the kit can further comprise instructions for suitable operational parameters in the form of a label or a separate insert. For example, the kit may have standard instructions informing a consumer how to wash the probe after a sample is contacted on the probe. In another example, the kit may have instructions for pre-fractionating a sample to reduce complexity of proteins in the sample. In another example, the kit may have instructions for automating the fractionation or other processes.

[0107] The present invention is further illustrated by the following examples which should not be construed as limiting. The contents of all references, patents and published patent applications cited throughout this application, as well as the Figures and Tables, are incorporated herein by reference.

### Example 1: Determination of Biomarkers in a Non-Human Primate Model of Stroke

[0108] Three juvenile healthy Specific Pathogen Free (SPF) rhesus monkeys (Macaca mulata), weighing 4.5-6.5 kg were screened for metabolic diseases by complete blood count and serum chemistry analysis. Coagulation evaluation tests were also performed. Animals were fasted 12 hours prior to surgery. Anesthesia was induced by ketamine (10-20 mg/kg IM). Atropine (O.Q4 mg/kg) was administered IM as part of the anesthesia pre-medications. Anesthesia was maintained with propofol (0.3-0.4 mg/kg/min) in a constant rate into the saphenous vein. A 3.0-3.5 mmID cuffed endotracheal tube was placed. Animals were connected to monitoring equipment (BM5 VET, Bionet America, CA) which included EKG, pulse oxymeter, capnographer, HR, RR, rectal temperature, and placed on an Air Warmer (Bair Hugger; Arizant, Eden Prairie, Minn.). Physiologic variables were kept within the normal range. Following sterile preparation with betadine and alcohol scrubbing of the monkey's inguinal area, the area was infiltrated with lidocaine 2% to prevent vasospasm of the femoral artery as well as local anesthesia. The Seldinger technique was used, which consists of an incision in the groin near the pulsation wave of the femoral artery. Using a Micropuncture Introducer Set 21G angiography puncture needle (Cook Medical, Bloomington, Ind.), a guide wire was introduced and a 4 fr. femoral sheath placed, while irrigating with a normal saline pressure bag. A 4 fr. diagnostic catheter (Terumo, Somerset, N.J.) was introduced over a 0.035 fr. guide wire (Terumo, Somerset, N.J.) and navigated the abdominal thoracic aorta until the aortic arch was reached, and from there the brachiocephalic trunk, common carotid artery and internal carotid artery were catheterized. Confirmation of catheter placement was done by injection of contrast material (Conray; Covidien, Hazelwood, Mo.) under digital angiographic control by using a C-Arm Fluoroscopy system. A Rapid Transit Microcatheter (Cordis, Bridgewater, N.J.) with a Traxcess 0.014 guiding wire (Terumo, Somerset, N.J.) was introduced and navigated into the M1 segment of the right middle cerebral artery (MCA). Occlusion of the M1 segment of the MCA was accomplished by injecting 6 to 8 (2 mm length) thrombogenic silk sutures (3-0 silk, Ethicon, San Lorenzo, PR) into the MCA through the catheter in saline using a 3 cc syringe. The incisions were closed with non-absorbent 4-0 sterile suture, and the monkeys were transported to the MRI facility for imaging. After the MRI, animals were returned to the recovery room and closely monitored by veterinary staff. The endotracheal tubes were removed when the swallowing reflex was restored. Once recovered enough to be able to sit, they were returned to their cages.

[0109] MRI was performed immediately after (1-3 hours following MRI while the animal was under anesthesia from the surgery) and 24 hours following MCAO. Images were acquired using a Philips Achieva 1.5-T scanner (Philips Medical Systems, Best, Netherlands) using an 8-channel SENSE head coil. Coronal slices were obtained perpendicular to a line joining the inferior surface of the genu and the splenium of the corpus callosum, which facilitated the re-acquisition of similar slices on the second imaging session. T2-weighted images were acquired with a Turbo Spin Echo sequence with 0.76×0.76×3 mm voxel resolution (TE=110 ms, TR=2316-2322 ms, Turbo factor=10, NSA=2, FOV=17 cm, matrix=224×222, 30 slices, no gap). Diffusion-weighted images were acquired with a single-shot Spin Echo EPI sequence with 1.72×1.72×2 mm resolution (b-values=0 and 1,000 s/mm², TE=58 ms, TR=9,977-10,047 ms, SENSE=2, NSA=6, FOV=11 cm, matrix=64×64, 41 slices, no gap). The diffusion-weighted images were registered to account for motion prior to generating Apparent Diffusion Coefficient (ADC) maps using the scanner's diffusion analysis software. Infarct volumes were approximated from both the ADC map and the T2-weighted images. Regions of interest (ROI) were hand-drawn by a radiologist on a slice-by-slice basis using the OsiriX software package (Rosset et al., 2004). The ROIs were drawn along the outer margin of the lesions. The total lesion volume was approximated by multiplying the total ROI area over all slices by the corresponding slice thickness.

[0110] Spontaneous behavior was recorded simultaneously on two different neurological scales: Standard Neurological Scale (Spetzler et al. 1980; Mack et al. 2003; and D'Arceuil et al. 2006) and Task-Oriented Neurological Scale (Mack et al. 2003). Each subject was observed twice: one or two days before MCAO to establish the baseline behavior and 20 to 23 hours after MCAO to test for the effect of the occlusion. In each session, behavior was recorded for 30 minutes by one observer who was not informed on which side of the brain the MCAO was performed. In addition to manual scoring, the animals were video recorded during each session. Since the scores obtained with the Standard Neurological Scale are measured in an ordinal scale, they were analyzed with the nonparametric Wilcoxon signed rank test. On the other hand, the scores obtained with the task-oriented scales are measured on a numeric scale and therefore, these data were analyzed with the paired t-test. After having the last MRI, animals were perfused with PBS under deep anesthesia. Brains were rapidly removed, cut continuously into 2 cm coronal slices, and biopsy punches were taken from peri-infarct regions based on the MRI data. To measure infarction, sections were stained with 2,3,5-triphenyltetrazolium chloride (TTC) then placed directly in 10% formalin. Coronal 20 mm fixed, frozen sections were used for histochemistry. Fluoro jadeB was carried out according to the manufacturer's protocols. Sections were mounted with an antifade medium.

[0111] Venous blood samples were collected at the pre-occlusion and 1-hour, 2-hours and 24-hours post-occlusion time points. The serum and peripheral blood mononuclear cells (PBMCs) were separated and stored at −80° C. for protein and RNA analysis. Cerebrospinal fluid (CSF) was collected according to well-established protocols.

[0112] FIGS. 1A-D show representative MRI images of the evolution of cerebral infarction from one of the monkeys using diffusion weighted (DWI) and T2-weighted imaging. Immediately after MCAO, restricted diffusion in the infarcted tissues was observed in two of the three monkeys observed (FIGS. 1A and 1E). There were minimal or no significant abnormalities in the T2-weighted images of any of the monkeys (FIG. 1B) as seen in human stroke patients. The infarcts, as defined by DWI, expanded 24 hours following MCAO in all animals (FIG. 1C). There was a corresponding increased T2 signal as well after 24 hours (FIG. 1D). While there was inter-animal variability in the size of the infarcts, the calculated infarct volumes increased in size compared to measurements obtained the previous day (FIG. 1E). Using a Task-Oriented Neurological Scale, the comparison of scores obtained before and after MCAO indicated a selective and significant (p<0.05) impairment in the category Distal Strength and Coordination, while no differences were observed in the categories measuring awareness and self care (Behavior) or Tone and Posture. The Task-Oriented Neurological Scale reflected a robust impairment in the left arm motor function with little or no impairment of the general neurobehavioral status of the animal. We also observed a correlation between the infarct size measured by DWI and the Distal Strength and Coordination measure (FIG. 1F).

### Example 2: RNA/Protein Isolation and Microarray Analysis in Non-Human Primate Model of Stroke

[0113] RNA and protein from PBMCs and brain biopsy punches were isolated using TRIZOL (InVitrogen, Inc., Carlsbad, Calif.) according to the manufacturers instructions. For microarray analysis, total RNA from PBMCs was converted to double-stranded cDNA. cRNA was synthesized using a RNA transcript labeling kit (Enzo Diagnostics, Farmingdale, N.Y., USA). Biotin-labeled cRNA was cleaned up using a GENECHIP Sample Cleanup Module (Affymetrix Inc, Santa Clara, Calif., USA). Twenty μg of the in vitro transcription product was fragmented in Fragmentation Buffer, by placing at 94° C. for 35 minutes. Following fragmentation, 15 μg of the biotinylated cRNA was hybridized to an GENECHIP® Rhesus Macaque Genome Array (Affymetrix, Inc. Santa Clara, Calif.). The chips were hybridized at 45° C. for 16 h, and then washed, stained with streptavidin-phycoerythrin, and scanned (GENECHIP® 3000 7G Scanner) according to manufacturing guidelines.

[0114] Data analysis was performed using Affymetrix Expression Console™ software that supports probe set summarization and CHP file generation of 3′ expression using the MASS Statistical algorithm. Resulting CHP data was normalized and further analyzed using Genespring GX10 (Agilent Technologies, Santa Clara, Calif.) and Genesis (Institute for Biomedical Engineering, Graz University of Technology (IBMT-TUG), Austria) Software. Gene expression values between time-points that increased or decreased by 2-fold or more were statistically significant (p<0.005) using 2-way ANOVA. Data were analyzed using Expression Console (Affymetrix Inc, Santa Clara, Calif. USA) and Genespring GX-10 (Agilent Technologies, Santa Clara, Calif.) software for initial analysis, normalization and replicate analysis. Ingenuity Pathway Analysis tools (Ingenuity Systems, www.ingenuity.com) was used to analyze gene networks, biological functions and canonical pathways. A data set containing gene identifiers and corresponding expression values was uploaded into in the application. Each gene identifier was mapped to its corresponding gene object in the Ingenuity Pathways Knowledge Base. Single array analysis was used to build the databases of gene expression profiles. Expression Console normalized data for each chip. Detection p-value (set at p<0.5) was used to statistically determine whether a transcript is expressed on a chip. The software generated a present (P), marginal (M) or absent (A) call for each transcript based on the p-value. Transcripts were considered differentially expressed if statistical logic generated calls of present and were then grouped as ‘known genes’ or ‘unknown genes’. Genes that were absent in all controls (pre-occlusion) and present at either time point are idenitifed in Tables 1-3. Self organizing map clustering and hierarchical clustering were used to identity candidates that were not present in blood prior to stroke and were induced in particular patterns following MCAO. Biomarkers that appeared in both the genomic and proteomic analyses were identified. IPA was used to predict whether these proteins are normally expressed in blood or perhaps released from the brain in response to ischemia and neuronal injury.

[0115] FIG. 2 is a representative image showing that a number of genes are induced in PBMCs (red bars) following stroke in the NHP stroke model compared to no or low expression at baseline (green bars). Genes that are differentially regulated in the NHP stroke model are listed in Tables 1-3. The corresponding human genes are listed in Tables 4-6. These gene products can be used as immediate early biomarkers (1 hr post stroke), early biomarkers (2 hr post stroke) or late biomarkers (24 hr post stroke) for stroke.

### Example 3: High Throughput Proteomic Analysis of Blood, Cerebrospinal Fluid and Brain Tissues from Monkeys Following Focal Ischemia

[0116] Stroke biomarker candidates identified from the genomic analysis as well as novel proteins were examined using LUMINEX technology, Western blot, peptidomics and mass spectroscopy.

[0117] Blood was collected from animals before MCAO and 1, 2 and 24 hours following stroke. Cytokines, chemokines and growth factors in blood serum, CSF and brain extracts were analyzed by multiplex bead immunoassay (LUMINEX 100, Luminex Corporation, Austin, Tex., USA) according to the manufacturer's instructions and using kits from Biosource (Cat. No.; LHC 0001, LHC 0151, LHC 9121, LHC 0171, Invitrogen, Carlsbad, Calif., USA). Pre-occlusion and 1, 2 and 24-hour serum samples from three Rhesus monkeys were evaluated simultaneously for circulating cytokines, chemokines and growth factors (IL-1α, IL-1β, IL-1ra, IL-3, IL-2, IL-4, IL-5, IL-6, IL-7, IL-8, IL-9, IL-10, IL-12 (p40), IL-12(p70), IL-13, IL-15, IL-17, EGF, Eotaxin, FGF-2, FTL-3 ligand, Fractalkine, G-CSF, GM-CSF, GRO, IFN-α2, IFN-γ, IP-10, MCP-1, MCP-3, MCD, MIP-1β, PDGF-aa, PGDF-aa bb, RANTES, sCD40L, sIL2-rα, TNF-α, TNF-β and VEGF) using a commercially available multiplex colorimetric bead-based cytokine immunoassay coupled with the LUMINEX system and human-specific bead sets (BioRad, San Diego, Calif.), according to the manufacturer's instructions. The results were interpolated from 5-parameter-fit standard curves generated using the relevant recombinant human proteins (BioRad). Proteins were also validated using antibodies in Western and dot blot analyses. In additional to the cytokines, chemokines and growth factors mentioned, expression of proteins identified by the microarray screen and compare to other stroke biomarkers from the published literature was examined (Foerch et al., 2009). FIG. 3A is a graph showing the protein levels of the cytokine MCP-1 in serum following MCAO in the NHP. MCP-1 increases significantly 1-2 hours after MCAO then returns to baseline at 24 hours following stroke using a LUMINEX assay. Western blot analysis of proteins from PBMCs indicates that the increased MCP-1 found in serum was induced in cells flowing stroke in the NHP (FIG. 3B).

[0118] Plasma or serum samples (˜0.5 μl) were first processed to remove larger proteins by passing them through a Microcon (Millipore cat #42406) YM-10 filter at 20,000×g for 20 min as described (Faith Maria, et al. MCP 2006; 5(6):998-1005). The filtrate was acidified to 0.25% final concentration of acetic acid before separation. The resulting peptides (10 μl) will be then separated on a 0.1×50 mm C18 column (Michrom Bioresources) using a linear gradient of acetonitrile (Sigma) in water (Burdick and Jackson) from 5% to 35% over 30 minutes. The column was then washed with 80% acetonitrile for 10 minutes followed by re-equilibration at 2% acetonitrile for an additional 10 minutes. Spectra were collected on an LTQ mass spectrometer (Thermo Scientific) using Excalibur 2.2 software. The minimum signal for DTA generation was set at 200.0 with an isolation width of 2.00, normalized collision energy of 35.0. Precursor scans were followed by MS/MS scans of the three most intense ions. Raw files were searched against a human database using BioWorks 3.3 software. Each sample was run in duplicate and all SRF files produced by BioWorks were compared using ProteoIQ (Bioinquire, Athens Ga.).

[0119] Confidence levels for each sample were set from false discovery rates of 0.05 determined from decoy database searches. FIG. 4 is a representative image showing that several proteins are increased (red bars) and decreased (green) in serum following stroke in the NHP stroke model. The numbers indicate the number of individual peptides in the serum that correspond to the presence of the specific protein. The result of the proteomic analysis is summarized in Tables 7 and 8.

[0120] The above description is for the purpose of teaching the person of ordinary skill in the art how to practice the present invention, and it is not intended to detail all those obvious modifications and variations of it which will become apparent to the skilled worker upon reading the description. It is intended, however, that all such obvious modifications and variations be included within the scope of the present invention, which is defined by the following claims. The claims are intended to cover the components and steps in any sequence which is effective to meet the objectives there intended, unless the context specifically indicates the contrary.

TABLE 1
Differentially expressed genes in PBMCs of NHPs 1-hr following MCAO

| Probe Set ID | Gene Symbol | Gene Title | UniGene ID | RefSeq Protein ID | Pre-O Signal | Pre-O detection | 1 hr Signal | 1-hr detection |
|---|---|---|---|---|---|---|---|---|
| MmugDNA.18724.1.S1_s_at | B4GALT6 | UDP-Gal:betaGlcNAc beta 1,4-galactosyltransferase, | Mmu.604 | XP_001099215 /// | 58.75183 | A | 55.18526 | P |
| | | polypeptide 6 | | XP_001099324 /// | | | | |
| | | | | XP_001099421 | | | | |
| MmugDNA.26392.1.S1_at | CCNF | cyclin F | Mmu.11675 | XP_001085466 | 114.6939 | A | 104.4854 | P |
| MmugDNA.25206.1.S1_at | CDC2 | cell division cycle 2, G1 to S and G2 to M | Mmu.16170 | XP_001095697 /// | 83.30299 | A | 49.54517 | P |
| | | | | XP_001095798 /// | | | | |
| | | | | XP_001095903 | | | | |
| Mmu.10362.1.S1_at | CLIC4 | chloride intracellular channel 4 | Mmu.4332 | XP_001106291 /// | 131.4646 | A | 89.32994 | P |
| | | | | XP_001106424 /// | | | | |
| | | | | XP_001106485 | | | | |
| MmunewRS.528.1.S1_at | CSF2RB | colony stimulating factor 2 | Mmu.1176 | XP_001086084 | 146.8577 | A | 325.4129 | P |
| | | receptor, beta, low-affinity | | | | | | |
| | | (granulocyte-macrophage) | | | | | | |
| Mmu.15973.2.S1_x_at | CSH-3 /// | chorionic somatommamotropin | Mmu.10849 | NP_001036203 /// | 122.2181 | A | 114.4969 | P |
| | CSH-4 /// | hormone 3 /// chorionic | | NP_001036207 /// | | | | |
| | GH1 /// | somatommamotropin hormone | | NP_001040618 /// | | | | |
| | LOC718474 | 4 /// growth hormone 1 /// | | NP_001040620 /// | | | | |
| | /// | similar to growth hormone 1 | | XP_001111200 /// | | | | |
| | LOC721256 | isoform 1 /// similar to growth | | XP_001116436 /// | | | | |
| | /// | hormone 1 isoform 1 /// | | XP_001117351 | | | | |
| | LOC735307 | chorionic somatomammotropin-1 | | | | | | |
| MmugDNA.5060.1.S1_at | CTNND1 | catenin (cadherin-associated protein), delta 1 | Mmu.1419 | XP_001094621 /// | 79.00558 | A | 296.0597 | P |
| | | | | XP_001095087 /// | | | | |
| | | | | XP_001095314 /// | | | | |
| | | | | XP_001095429 /// | | | | |
| | | | | XP_001095545 /// | | | | |
| | | | | XP_001095646 /// | | | | |
| | | | | XP_001095745 /// | | | | |
| | | | | XP_001095859 /// | | | | |
| | | | | XP_001095967 /// | | | | |
| | | | | XP_001096070 /// | | | | |
| | | | | XP_001096183 /// | | | | |
| | | | | XP_001096303 /// | | | | |
| | | | | XP_001096427 /// | | | | |
| | | | | XP_001096539 /// | | | | |
| | | | | XP_001096644 /// | | | | |
| | | | | XP_001096747 /// | | | | |
| | | | | XP_001096864 /// | | | | |
| | | | | XP_001096974 /// | | | | |
| | | | | XP_001097086 /// | | | | |
| | | | | XP_001097202 /// | | | | |
| | | | | XP_001097299 /// | | | | |
| | | | | XP_001097408 /// | | | | |
| | | | | XP_001097505 /// | | | | |
| | | | | XP_001097599 /// | | | | |
| | | | | XP_001097712 /// | | | | |
| | | | | XP_001097810 /// | | | | |
| | | | | XP_001097908 /// | | | | |
| | | | | XP_001097998 /// | | | | |
| | | | | XP_001098090 /// | | | | |
| | | | | XP_001098194 /// | | | | |
| | | | | XP_001098301 /// | | | | |
| | | | | XP_001098398 /// | | | | |
| | | | | XP_001098491 /// | | | | |
| | | | | XP_001098588 /// | | | | |
| | | | | XP_001098689 /// | | | | |
| | | | | XP_001098792 /// | | | | |
| | | | | XP_001098897 /// | | | | |
| | | | | XP_001098993 /// | | | | |
| | | | | XP_001099102 /// | | | | |
| | | | | XP_001099203 /// | | | | |
| | | | | XP_001099314 /// | | | | |
| | | | | XP_001099411 /// | | | | |
| | | | | XP_001099522 /// | | | | |
| | | | | XP_001099613 /// | | | | |
| | | | | XP_001099715 /// | | | | |
| | | | | XP_001099819 /// | | | | |
| | | | | XP_001099920 | | | | |
| MmugDNA.1267.1.S1_s_at | CYP3A64 /// | cytochrome P450 3A64 /// | Mmu.9706 | NP_001035504 /// | 89.83363 | A | 288.6809 | P |
| | LOC718917 | similar to Cytochrome P450 3A7 (CYPIIIA7) | | XP_001097930 /// | | | | |
| | | (P450-HFLA) | | XP_001112281 | | | | |
| MmugDNA.36232.1.S1_at | DAB2 | disabled homolog 2 | Mmu.12958 | XP_001084792 | 72.17534 | A | 60.9826 | P |
| MmugDNA.13802.1.S1_at | DCN | decorin | Mmu.1687 | XP_001103412 /// | 52.87949 | A | 78.89815 | P |
| | | | | XP_001103495 /// | | | | |
| | | | | XP_001103577 /// | | | | |
| | | | | XP_001103663 /// | | | | |
| | | | | XP_001103749 /// | | | | |
| | | | | XP_001103834 /// | | | | |
| | | | | XP_001103918 /// | | | | |
| | | | | XP_001104009 /// | | | | |
| | | | | XP_001104095 /// | | | | |
| | | | | XP_001104178 /// | | | | |
| | | | | XP_001104261 /// | | | | |
| | | | | XP_001104340 | | | | |
| MmugDNA.22700.1.S1_at | DCN | decorin | Mmu.1687 | XP_001103412 /// | 120.1081 | A | 180.4038 | P |
| | | | | XP_001103495 /// | | | | |
| | | | | XP_001103577 /// | | | | |
| | | | | XP_001103663 /// | | | | |
| | | | | XP_001103749 /// | | | | |
| | | | | XP_001103834 /// | | | | |
| | | | | XP_001103918 /// | | | | |
| | | | | XP_001104009 /// | | | | |
| | | | | XP_001104095 /// | | | | |
| | | | | XP_001104178 /// | | | | |
| | | | | XP_001104261 /// | | | | |
| | | | | XP_001104340 | | | | |
| MmugDNA.41798.1.S1_at | DHRS7 | dehydrogenase/reductase (SDR family) member 7 | Mmu.4703 | XP_001095590 /// | 122.1582 | A | 142.4385 | P |
| | | | | XP_001095688 /// | | | | |
| | | | | XP_001095790 | | | | |
| MmugDNA.26154.1.S1_at | DRD2 | dopamine receptor D2 | Mmu.3401 | XP_001085336 /// | 94.5069 | A | 172.3374 | P |
| | | | | XP_001085449 /// | | | | |
| | | | | XP_001085571 | | | | |
| MmugDNA.26188.1.S1_at | ECEL1 | endothelin converting enzyme-like 1 | Mmu.11796 | XP_001117070 | 178.3571 | A | 271.1654 | P |
| MmugDNA.38477.1.S1_at | ELK4 | ELK4, ETS-domain protein (SRF accessory protein 1) | — | XP_001087748 | 144.6712 | A | 136.5781 | P |
| MmugDNA.27688.1.S1_at | EPOR | erythropoietin receptor | — | XP_001105833 | 188.3416 | A | 249.6902 | P |
| MmuSTS.4736.1.S1_at | ERBB3 | v-erb-b2 erythroblastic leukemia viral oncogene | Mmu.758 | XP_001113794 /// | 161.6664 | A | 180.3977 | P |
| | | homolog 3 (avian) | | XP_001113900 /// | | | | |
| | | | | XP_001113928 /// | | | | |
| | | | | XP_001113953 | | | | |
| MmugDNA.18128.1.S1_at | F7 | coagulation factor VII | Mmu.11080 | NP_001073605 /// | 95.21188 | A | 159.5128 | P |
| | | | | XP_001118128 | | | | |
| MmuSTS.4781.1.S1_at | FKBP10 | FK506 binding protein 10, 65 kDa | Mmu.14407 | XP_001107581 /// | 144.692 | A | 199.3497 | P |
| | | | | XP_001107638 /// | | | | |
| | | | | XP_001107696 /// | | | | |
| | | | | XP_001107756 /// | | | | |
| | | | | XP_001107821 | | | | |
| MmuSTS.4804.1.S1_at | FPR2 | formyl peptide receptor 2 | Mmu.15383 | XP_001116437 /// | 314.0186 | A | 651.3593 | P |
| | | | | XP_001116445 /// | | | | |
| | | | | XP_001116452 | | | | |
| MmugDNA.22053.1.S1_at | GGCX | gamma-glutamyl carboxylase | Mmu.13911 | XP_001086016 /// | 309.7049 | A | 350.4313 | P |
| | | | | XP_001086474 | | | | |
| MmugDNA.13746.1.S1_s_at | GK | glycerol kinase | Mmu.16427 | XP_001100778 /// | 21.59358 | A | 53.15634 | P |
| | | | | XP_001100861 /// | | | | |
| | | | | XP_001100968 | | | | |
| MmugDNA.37125.1.S1_at | GLRB | glycine receptor, beta | Mmu.1658 | XP_001093718 /// | 140.4933 | A | 195.3956 | P |
| | | | | XP_001093832 | | | | |
| Mmu.8905.1.S1_at | GPD1 | glycerol-3-phosphate | Mmu.3010 | XP_001102726 | 70.93366 | A | 112.7022 | P |
| | | dehydrogenase 1 (soluble) | | | | | | |
| Mmu.11695.1.S1_at | GPR34 | G protein-coupled receptor 34 | Mmu.3224 | XP_001087742 /// | 146.0326 | A | 99.20039 | P |
| | | | | XP_001087858 /// | | | | |
| | | | | XP_001087981 /// | | | | |
| | | | | XP_001088105 | | | | |
| MmuSTS.2489.1.S1_at | GPR77 | G protein-coupled receptor 77 | Mmu.15399 | XP_001112895 /// | 85.30246 | A | 155.9195 | P |
| | | | | XP_001112923 /// | | | | |
| | | | | XP_001112956 | | | | |
| MmugDNA.7761.1.S1_at | HIPK2 | homeodomain interacting protein kinase 2 | Mmu.4514 | XP_001106719 | 112.2257 | A | 149.4128 | P |
| MmuSTS.1348.1.S1_at | HOXB7 | homeobox B7 | Mmu.16913 | XP_001088822 | 134.1311 | A | 174.3028 | P |
| MmugDNA.18776.1.S1_at | HPD | 4-hydroxyphenylpyruvate dioxygenase | Mmu.14575 | XP_001096061 /// | 81.20009 | A | 180.3834 | P |
| | | | | XP_001096175 | | | | |
| MmugDNA.28970.1.S1_at | IL1RN | interleukin 1 receptor antagonist | Mmu.15827 | XP_001091493 /// | 126.3157 | A | 288.0709 | P |
| | | | | XP_001091717 /// | | | | |
| | | | | XP_001091833 | | | | |
| MmuSTS.681.1.S1_at | IL1RN | interleukin 1 receptor antagonist | Mmu.15827 | XP_001091493 /// | 108.0968 | A | 374.1611 | P |
| | | | | XP_001091717 /// | | | | |
| | | | | XP_001091833 | | | | |
| MmugDNA.36020.1.S1_at | ITGB5 | integrin, beta 5 | Mmu.1239 | XP_001113831 /// | 118.9835 | A | 125.353 | P |
| | | | | XP_001113881 /// | | | | |
| | | | | XP_001113909 | | | | |
| Mmu.7460.6.S1_x_at | KIR3DH5 | killer-cell Ig-like receptor KIR3DH5 | Mmu.17415 | NP_001098643 | 251.4261 | A | 276.8067 | P |
| Mmu.9316.1.S1_at | KLF11 | Kruppel-like factor 11 | Mmu.11355 | XP_001090608 | 501.1391 | A | 764.6097 | P |
| MmuSTS.1757.1.S1_at | LOC693556 | similar to ras responsive | Mmu.14828 | XP_001082265 /// | 109.3152 | A | 140.1759 | P |
| | | element binding protein 1 isoform 1 | | XP_001082516 /// | | | | |
| | | | | XP_001082652 /// | | | | |
| | | | | XP_001082784 /// | | | | |
| | | | | XP_001082911 | | | | |
| MmugDNA.20287.1.S1_at | LOC693696 | similar to longevity assurance homolog 2 | Mmu.16301 | XP_001082530 /// | 9.598577 | A | 66.55032 | P |
| | | | | XP_001082667 /// | | | | |
| | | | | XP_001082802 | | | | |
| MmugDNA.17057.1.S1_at | LOC694043 | Similar to RECK protein precursor | Mmu.12983 | XP_001083242 /// | 36.28584 | A | 109.4269 | P |
| | | | | XP_001083599 | | | | |
| MmugDNA.14488.1.S1_at | LOC694192 | similar to Protein C18orf54 precursor | Mmu.15470 | XP_001082497 /// | 158.6407 | A | 85.90692 | P |
| | | | | XP_001082628 /// | | | | |
| | | | | XP_001082761 | | | | |
| MmugDNA.32899.1.S1_at | LOC694220 | similar to glutathione S- | Mmu.16453 | XP_001083156 /// | 151.0824 | A | 150.7997 | P |
| | | transferase, C-terminal domain | | XP_001083273 /// | | | | |
| | | containing isoform 1 | | XP_001083401 | | | | |
| MmugDNA.35637.1.S1_at | LOC694461 | similar to RIO kinase 1 isoform 1 | Mmu.13193 | XP_001084416 /// | 195.3009 | A | 278.8399 | P |
| | | | | XP_001084537 /// | | | | |
| | | | | XP_001084661 | | | | |
| MmugDNA.7498.1.S1_at | LOC695519 | hypothetical protein LOC695519 | Mmu.14586 | XP_001088156 | 103.4704 | A | 289.532 | P |
| MmugDNA.23700.1.S1_at | LOC695660 | similar to glutamate receptor 6 isoform 1 precursor | Mmu.14770 | XP_001086511 /// | 71.56487 | A | 134.0835 | P |
| | | | | XP_001086640 /// | | | | |
| | | | | XP_001086762 | | | | |
| MmugDNA.40736.1.S1_at | LOC695861 | similar to regulatory factor X3 isoform b | Mmu.15656 | XP_001086023 /// | 59.62864 | A | 159.93 | P |
| | | | | XP_001086140 /// | | | | |
| | | | | XP_001086369 /// | | | | |
| | | | | XP_001086480 /// | | | | |
| | | | | XP_001086606 /// | | | | |
| | | | | XP_001086729 | | | | |
| MmugDNA.3419.1.S1_at | LOC696314 | similar to tumor necrosis factor, | Mmu.9026 | — | 133.7824 | A | 178.2315 | P |
| | | alpha-induced protein 2 | | | | | | |
| MmugDNA.40590.1.S1_at | LOC696991 | similar to CG13322-PA, isoform A | Mmu.15342 | XP_001090213 /// | 151.6879 | A | 117.6347 | P |
| | | | | XP_001090328 /// | | | | |
| | | | | XP_001090443 /// | | | | |
| | | | | XP_001090556 | | | | |
| MmugDNA.23596.1.S1_at | LOC697028 | similar to dedicator of cytokinesis 7 | Mmu.4738 | XP_001085641 | 42.86666 | A | 83.91882 | P |
| MmugDNA.19935.1.S1_at | LOC697140 | similar to LIM domain binding 3 | Mmu.11452 | XP_001084921 /// | 127.76 | A | 82.97771 | P |
| | | | | XP_001085158 /// | | | | |
| | | | | XP_001085274 | | | | |
| MmugDNA.25784.1.S1_at | LOC697300 | Similar to DNA topoisomerase I | Mmu.12250 | XP_001088021 | 107.8373 | A | 168.2853 | P |
| MmugDNA.41587.1.S1_at | LOC697948 | similar to Apical Junction | Mmu.15719 | XP_001094873 /// | 231.1788 | A | 220.4972 | P |
| | | Molecule family member (ajm-1) | | XP_001094990 /// | | | | |
| | | | | XP_001095091 /// | | | | |
| | | | | XP_001095202 /// | | | | |
| | | | | XP_001095318 /// | | | | |
| | | | | XP_001095432 /// | | | | |
| | | | | XP_001095548 | | | | |
| MmugDNA.8688.1.S1_s_at | LOC698576 | similar to plakophilin 4 isoform a | Mmu.90 | XP_001090763 /// | 57.58762 | A | 168.3158 | P |
| | | | | XP_001091487 /// | | | | |
| | | | | XP_001091595 /// | | | | |
| | | | | XP_001091710 /// | | | | |
| | | | | XP_001091829 | | | | |
| MmugDNA.25652.1.S1_at | LOC698610 | similar to netrin-G1 ligand | Mmu.14852 | XP_001090221 /// | 159.8217 | A | 335.8282 | P |
| | | | | XP_001090333 /// | | | | |
| | | | | XP_001090447 | | | | |
| MmugDNA.7880.1.S1_at | LOC698922 | similar to transcription | Mmu.1273 | XP_001087401 | 67.81429 | A | 129.1399 | P |
| | | elongation factor B (SIII), polypeptide 1 | | | | | | |
| MmugDNA.26991.1.S1_x_at | LOC699049 | similar to SMT3 suppressor of | Mmu.10807 | XP_001082298 /// | 132.9624 | A | 98.17895 | P |
| | /// | mif two 3 homolog 2 /// similar | | XP_001093875 /// | | | | |
| | LOC705512 | to SMT3 suppressor of mif two | | XP_001101180 | | | | |
| | /// | 3 homolog 2 isoform b | | | | | | |
| | LOC712242 | precursor /// similar to SMT3 | | | | | | |
| | /// SUMO2 | suppressor of mif two 3 | | | | | | |
| | | homolog 2 /// SMT3 suppressor | | | | | | |
| | | of mif two 3 homolog 2 (S. cerevisiae) | | | | | | |
| MmugDNA.30038.1.S1_at | LOC699233 | similar to J domain protein C21orf55 | Mmu.14908 | XP_001091149 /// | 20.38795 | A | 40.94059 | P |
| | | | | XP_001091275 /// | | | | |
| | | | | XP_001091400 | | | | |
| MmugDNA.24540.1.S1_at | LOC699255 | similar to c-Mpl binding protein | Mmu.8566 | XP_001103235 | 97.93331 | A | 95.29922 | P |
| | /// | isoform c /// similar to c-Mpl | | | | | | |
| | LOC713773 | binding protein isoform a | | | | | | |
| MmugDNA.36570.1.S1_at | LOC699320 | similar to keratin 1 | Mmu.15995 | XP_001097706 /// | 82.466 | A | 52.41996 | P |
| | | | | XP_001097800 /// | | | | |
| | | | | XP_001097902 /// | | | | |
| | | | | XP_001097988 /// | | | | |
| | | | | XP_001098082 /// | | | | |
| | | | | XP_001098182 /// | | | | |
| | | | | XP_001098292 | | | | |
| MmugDNA.34762.1.S1_at | LOC699606 | similar to YKT6 v-SNARE protein | Mmu.14457 | XP_001092458 /// | 352.2617 | A | 340.2292 | P |
| | | | | XP_001092567 | | | | |
| MmugDNA.35909.1.S1_at | LOC700246 | hypothetical protein LOC700246 | Mmu.16339 | XP_001091537 /// | 141.387 | A | 109.4642 | P |
| | | | | XP_001091653 /// | | | | |
| | | | | XP_001091770 | | | | |
| MmugDNA.2141.1.S1_at | LOC700632 | similar to tumor protein p53 | Mmu.12749 | XP_001090474 /// | 103.4481 | A | 110.7 | P |
| | | inducible nuclear protein 1 | | XP_001090592 | | | | |
| MmugDNA.6969.1.S1_s_at | LOC700634 | similar to PTK2 protein tyrosine kinase 2 isoform a | Mmu.3254 | XP_001091188 /// | 318.6551 | A | 548.1872 | P |
| | | | | XP_001092257 /// | | | | |
| | | | | XP_001092479 /// | | | | |
| | | | | XP_001092599 /// | | | | |
| | | | | XP_001092714 /// | | | | |
| | | | | XP_001092835 /// | | | | |
| | | | | XP_001092947 /// | | | | |
| | | | | XP_001093060 /// | | | | |
| | | | | XP_001093166 /// | | | | |
| | | | | XP_001093282 | | | | |
| MmugDNA.11282.1.S1_at | LOC700766 | similar to CG14299-PA, isoform A | Mmu.13220 | XP_001089105 | 102.762 | A | 134.5001 | P |
| MmuSTS.1092.1.S1_at | LOC701162 | similar to solute carrier family 6, member 17 | Mmu.11269 | XP_001099500 | 62.05202 | A | 108.5072 | P |
| MmugDNA.9882.1.S1_at | LOC701376 | similar to NADPH oxidase 1 isoform long variant | Mmu.15254 | XP_001089791 /// | 59.80977 | A | 168.2042 | P |
| | | | | XP_001089905 /// | | | | |
| | | | | XP_001090025 /// | | | | |
| | | | | XP_001090252 /// | | | | |
| | | | | XP_001090373 | | | | |
| MmugDNA.24847.1.S1_at | LOC701547 | similar to glycine-N-acyltransferase-like 1 | Mmu.14222 | XP_001092072 /// | 104.8917 | A | 97.61919 | P |
| | | | | XP_001092197 /// | | | | |
| | | | | XP_001092316 /// | | | | |
| | | | | XP_001092427 | | | | |
| Mmu.11429.1.A1_at | LOC701690 | Similar to T-cell activation Rho | Mmu.12230 | XP_001095239 /// | 125.3303 | A | 148.4935 | P |
| | | GTPase-activating protein isoform b | | XP_001095349 /// | | | | |
| | | | | XP_001095467 /// | | | | |
| | | | | XP_001095579 /// | | | | |
| | | | | XP_001095675 /// | | | | |
| | | | | XP_001095775 | | | | |
| MmugDNA.14409.1.S1_at | LOC701722 | similar to nucleoporin 62 | Mmu.12987 | XP_001094695 | 17.99913 | A | 56.40857 | P |
| MmugDNA.12356.1.S1_at | LOC702392 | similar to peroxin1 | Mmu.13262 | XP_001100851 /// | 267.6477 | A | 482.0948 | P |
| | | | | XP_001101055 | | | | |
| MmugDNA.35938.1.S1_at | LOC702474 | similar to F46E10.1a /// similar | Mmu.11756 | XP_001093983 /// | 212.2583 | A | 148.9655 | P |
| | /// | to radical S-adenosyl | | XP_001097818 | | | | |
| | LOC705626 | methionine domain containing 1 | | | | | | |
| MmugDNA.30120.1.S1_at | LOC702596 | similar to nucleolar RNA- | Mmu.15669 | XP_001099108 /// | 517.206 | A | 779.2531 | P |
| | | associated protein alpha isoform | | XP_001099208 | | | | |
| MmugDNA.14645.1.S1_at | LOC702627 | similar to CNKSR family member 3 | Mmu.16800 | XP_001095122 | 112.3272 | A | 135.1359 | P |
| MmuSTS.4277.1.S1_at | LOC702809 | similar to eukaryotic translation | Mmu.7828 | XP_001096741 /// | 46.99945 | A | 76.99638 | P |
| | /// | elongation factor 1 alpha 2 /// | | XP_001107881 /// | | | | |
| | LOC703715 | similar to eukaryotic translation | | XP_001107938 /// | | | | |
| | /// | elongation factor 1 alpha 2 /// | | XP_001107997 /// | | | | |
| | LOC704199 | similar to eukaryotic translation | | XP_001108047 | | | | |
| | /// | elongation factor 1 alpha 2 /// | | | | | | |
| | LOC704438 | similar to eukaryotic translation | | | | | | |
| | /// | elongation factor 1 alpha 1 /// | | | | | | |
| | LOC709017 | similar to eukaryotic translation | | | | | | |
| | /// | elongation factor 1 alpha 1 /// | | | | | | |
| | LOC715351 | similar to eukaryotic translation | | | | | | |
| | | elongation factor 1 alpha 1 | | | | | | |
| MmugDNA.18234.1.S1_s_at | LOC703331 | similar to runt-related | Mmu.14787 | XP_001100592 /// | 58.99397 | A | 140.3681 | P |
| | | transcription factor 2 isoform b | | XP_001100682 /// | | | | |
| | | | | XP_001100772 /// | | | | |
| | | | | XP_001100855 /// | | | | |
| | | | | XP_001100961 /// | | | | |
| | | | | XP_001101058 | | | | |
| MmugDNA.42623.1.S1_at | LOC703350 | Similar to SLD5 | Mmu.12445 | XP_001094432 | 116.1626 | A | 122.4898 | P |
| MmugDNA.14145.1.S1_s_at | LOC703676 | similar to clusterin associated | Mmu.12076 | XP_001095007 | 9.514027 | A | 65.8841 | P |
| | | protein 1 isoform 1 | | | | | | |
| MmugDNA.6896.1.S1_at | LOC703747 | hypothetical protein LOC703747 | Mmu.11245 | XP_001097797 /// | 99.1186 | A | 203.7421 | P |
| | | | | XP_001097899 /// | | | | |
| | | | | XP_001097986 /// | | | | |
| | | | | XP_001098078 /// | | | | |
| | | | | XP_001098178 /// | | | | |
| | | | | XP_001098384 | | | | |
| MmugDNA.20879.1.S1_at | LOC703981 | similar to NOD9 protein isoform 1 | Mmu.15714 | XP_001104018 /// | 68.5675 | A | 220.5779 | P |
| | | | | XP_001104187 /// | | | | |
| | | | | XP_001104271 /// | | | | |
| | | | | XP_001104348 /// | | | | |
| | | | | XP_001104430 | | | | |
| MmugDNA.43058.1.S1_at | LOC704126 | similar to kinesin family member 13A | Mmu.14823 | XP_001096456 /// | 240.8623 | A | 350.718 | P |
| | | | | XP_001096670 /// | | | | |
| | | | | XP_001096780 /// | | | | |
| | | | | XP_001096896 | | | | |
| MmugDNA.32338.1.S1_at | LOC704620 | Hypothetical protein LOC704620 | Mmu.12860 | XP_001092983 | 484.9445 | A | 883.7935 | P |
| MmugDNA.26222.1.S1_at | LOC704779 | hypothetical protein LOC704779 | Mmu.1356 | XP_001088505 /// | 145.6491 | A | 301.6946 | P |
| | | | | XP_001088616 /// | | | | |
| | | | | XP_001088722 /// | | | | |
| | | | | XP_001088845 | | | | |
| MmugDNA.41256.1.S1_at | LOC705369 | similar to SET domain containing 3 | Mmu.12527 | XP_001103146 /// | 307.612 | A | 308.8239 | P |
| | | | | XP_001103224 /// | | | | |
| | | | | XP_001103370 | | | | |
| MmugDNA.32069.1.S1_at | LOC705781 | similar to CG10721-PA | Mmu.11312 | XP_001098386 | 139.6408 | A | 177.6773 | P |
| MmugDNA.7008.1.S1_at | LOC705781 | similar to CG10721-PA | Mmu.11312 | XP_001098386 | 257.4816 | A | 150.1654 | P |
| MmugDNA.11389.1.S1_at | LOC705913 | similar to cytidine deaminase | Mmu.14713 | XP_001096632 | 157.2027 | A | 225.252 | P |
| Mmu.8604.1.A1_at | LOC706093 | Similar to golgi-associated | Mmu.12976 | XP_001099454 /// | 105.2247 | A | 94.18667 | P |
| | | microtubule-binding protein HOOK3 | | XP_001099564 | | | | |
| MmugDNA.6257.1.S1_at | LOC706392 | similar to Temporarily Assigned | Mmu.15492 | XP_001100027 /// | 28.65171 | A | 176.2832 | P |
| | | Gene name family member (tag-241) | | XP_001100112 /// | | | | |
| | | | | XP_001100204 | | | | |
| MmugDNA.2760.1.S1_at | LOC706531 | similar to SRY (sex determining region Y)-box 4 | Mmu.2172 | XP_001098923 | 494.1494 | A | 361.4545 | P |
| MmugDNA.21203.1.S1_x_at | LOC707383 | similar to amyloid beta (A4) | Mmu.669 | XP_001101993 | 428.4578 | A | 214.6058 | P |
| | | precursor protein-binding, | | | | | | |
| | | family B, member 1 interacting protein | | | | | | |
| MmugDNA.35674.1.S1_at | LOC707661 | similar to additional sex combs like 1 | Mmu.15484 | XP_001101400 /// | 110.2575 | A | 137.5026 | P |
| | | | | XP_001101495 /// | | | | |
| | | | | XP_001101584 /// | | | | |
| | | | | XP_001101677 | | | | |
| MmugDNA.14411.1.S1_at | LOC707686 | similar to angiogenic factor VG5Q | Mmu.12022 | XP_001106588 /// | 312.2592 | A | 193.1674 | P |
| | | | | XP_001106645 /// | | | | |
| | | | | XP_001106704 /// | | | | |
| | | | | XP_001106767 | | | | |
| MmugDNA.6011.1.S1_at | LOC707982 | similar to rhomboid domain | Mmu.15898 | XP_001110015 /// | 253.2026 | A | 444.7268 | P |
| | /// | containing 1 /// hypothetical | | XP_001110070 /// | | | | |
| | LOC708189 | protein LOC708189 | | XP_001110119 /// | | | | |
| | | | | XP_001110165 /// | | | | |
| | | | | XP_001110210 | | | | |
| MmugDNA.37057.1.S1_at | LOC708094 | similar to mannosyl (alpha-1,3-)- | Mmu.15839 | XP_001102758 /// | 104.4101 | A | 124.6013 | P |
| | | glycoprotein beta-1,4-N- | | XP_001102852 | | | | |
| | | acetylglucosaminyltransferase, | | | | | | |
| | | isoenzyme A | | | | | | |
| MmugDNA.30697.1.S1_at | LOC708649 | similar to leucine rich repeat containing 28 | Mmu.13704 | XP_001101795 /// | 163.4347 | A | 185.626 | P |
| | | | | XP_001101886 /// | | | | |
| | | | | XP_001101987 /// | | | | |
| | | | | XP_001102074 | | | | |
| MmuSTS.4837.1.S1_at | LOC708940 | similar to Guanine nucleotide- | Mmu.14862 | XP_001108555 /// | 67.89697 | A | 77.73469 | P |
| | | binding protein G(i), alpha-1 | | XP_001108609 /// | | | | |
| | | subunit (Adenylate cyclase- | | XP_001108656 | | | | |
| | | inhibiting G alpha protein) | | | | | | |
| MmuSTS.508.1.S1_at | LOC709049 | similar to activating signal | Mmu.14734 | XP_001105587 /// | 145.0563 | A | 121.9355 | P |
| | | cointegrator 1 complex subunit 1 | | XP_001105655 /// | | | | |
| | | | | XP_001105727 /// | | | | |
| | | | | XP_001105789 /// | | | | |
| | | | | XP_001105856 /// | | | | |
| | | | | XP_001105929 /// | | | | |
| | | | | XP_001106003 | | | | |
| MmugDNA.32637.1.S1_at | LOC709253 | similar to nucleosomal binding protein 1 | Mmu.13802 | XP_001103630 | 80.94846 | A | 79.39787 | P |
| Mmu.10346.1.S1_at | LOC709544 | hypothetical protein LOC709544 | Mmu.16556 | XP_001096738 | 507.0977 | A | 328.4313 | P |
| MmugDNA.1217.1.S1_at | LOC709920 | similar to Helix-loop-helix | Mmu.15111 | XP_001112029 /// | 8.452376 | A | 74.10219 | P |
| | | protein 2 (HEN2) (Nescient | | XP_001112063 /// | | | | |
| | | helix loop helix 2) (NSCL-2) | | XP_001112098 | | | | |
| MmugDNA.26478.1.S1_at | LOC710518 | similar to mitochondrial solute | Mmu.11000 | XP_001105927 /// | 455.317 | A | 606.7848 | P |
| | | carrier-like protein | | XP_001106001 /// | | | | |
| | | | | XP_001106076 /// | | | | |
| | | | | XP_001106141 /// | | | | |
| | | | | XP_001106211 | | | | |
| MmugDNA.28666.1.S1_at | LOC710731 | similar to palmdelphin | Mmu.12773 | XP_001105606 /// | 37.84584 | A | 95.51393 | P |
| | | | | XP_001105677 /// | | | | |
| | | | | XP_001105748 /// | | | | |
| | | | | XP_001105804 /// | | | | |
| | | | | XP_001105954 | | | | |
| MmugDNA.17269.1.S1_at | LOC711164 | similar to sulfite oxidase | Mmu.15990 | XP_001113374 /// | 171.6959 | A | 246.8745 | P |
| | | | | XP_001113406 /// | | | | |
| | | | | XP_001113430 /// | | | | |
| | | | | XP_001113456 | | | | |
| MmugDNA.4283.1.S1_at | LOC711279 | similar to leucine zipper, | Mmu.16155 | XP_001109524 /// | 156.9818 | A | 240.0757 | P |
| | | putative tumor suppressor 2 | | XP_001109574 /// | | | | |
| | | | | XP_001109628 /// | | | | |
| | | | | XP_001109674 /// | | | | |
| | | | | XP_001109715 /// | | | | |
| | | | | XP_001109770 /// | | | | |
| | | | | XP_001109817 | | | | |
| MmugDNA.33876.1.S1_s_at | LOC711336 | similar to olfactomedin 2 | Mmu.15445 | XP_001099531 /// | 105.1338 | A | 116.0832 | P |
| | | | | XP_001099628 /// | | | | |
| | | | | XP_001099726 /// | | | | |
| | | | | XP_001099831 | | | | |
| MmugDNA.17217.1.S1_at | LOC711485 | similar to acyl-Coenzyme A | Mmu.12959 | XP_001109931 | 123.1174 | A | 238.599 | P |
| | | dehydrogenase, long chain precursor | | | | | | |
| MmugDNA.15166.1.S1_at | LOC711633 | similar to zinc finger CCCH-type containing 10 | Mmu.15988 | XP_001114089 /// | 185.2786 | A | 222.4264 | P |
| | | | | XP_001114107 /// | | | | |
| | | | | XP_001114132 /// | | | | |
| | | | | XP_001114150 | | | | |
| MmuSTS.4200.1.S1_at | LOC711691 | Similar to pre-B-cell leukemia | Mmu.4832 | XP_001100529 | 105.6631 | A | 385.9178 | P |
| | | transcription factor 3 | | | | | | |
| MmugDNA.30723.1.S1_at | LOC711984 | Similar to zinc finger CCCH- | Mmu.12594 | XP_001106124 /// | 175.1743 | A | 445.4023 | P |
| | | type domain containing 7 | | XP_001106316 /// | | | | |
| | | | | XP_001106384 /// | | | | |
| | | | | XP_001106446 | | | | |
| MmugDNA.20892.1.S1_at | LOC712033 | similar to PCTAIRE protein kinase 1 | Mmu.14735 | XP_001100911 | 120.9395 | A | 238.5381 | P |
| MmugDNA.10446.1.S1_at | LOC712115 | similar to ADP-ribosylation | Mmu.14062 | XP_001101005 | 75.08247 | A | 68.66737 | P |
| | | factor guanine nucleotide factor 6 isoform a | | | | | | |
| MmugDNA.12728.1.S1_at | LOC712272 | similar to fibronectin type 3 and | Mmu.13034 | XP_001109699 | 37.6952 | A | 102.0832 | P |
| | | SPRY domain-containing protein | | | | | | |
| MmugDNA.22601.1.S1_at | LOC713029 | hypothetical protein LOC713029 | Mmu.14564 | XP_001110409 | 11.16738 | A | 58.5388 | P |
| MmugDNA.12133.1.S1_at | LOC713035 | similar to BCL2-like 1 isoform 1 | Mmu.16103 | XP_001109879 /// | 159.8234 | A | 137.4199 | P |
| | | | | XP_001109926 /// | | | | |
| | | | | XP_001109964 /// | | | | |
| | | | | XP_001110009 /// | | | | |
| | | | | XP_001110062 /// | | | | |
| | | | | XP_001110113 /// | | | | |
| | | | | XP_001110162 /// | | | | |
| | | | | XP_001110205 /// | | | | |
| | | | | XP_001110245 /// | | | | |
| | | | | XP_001110285 /// | | | | |
| | | | | XP_001110326 | | | | |
| MmugDNA.17300.1.S1_s_at | LOC713324 | similar to erythrocyte | Mmu.14133 | XP_001102639 | 68.31221 | A | 110.1094 | P |
| | | membrane protein band 4.1 like 4B isoform 2 | | | | | | |
| MmuSTS.2766.1.S1_at | LOC713353 | Similar to unactive progesterone receptor, 23 Kd | Mmu.4022 | XP_001115328 /// | 77.942 | A | 160.7406 | P |
| | | | | XP_001115356 /// | | | | |
| | | | | XP_001115374 /// | | | | |
| | | | | XP_001115388 | | | | |
| MmugDNA.37205.1.S1_at | LOC713800 | similar to plexin A2 | Mmu.15066 | XP_001110877 /// | 40.86835 | A | 79.4382 | P |
| | | | | XP_001110951 /// | | | | |
| | | | | XP_001110980 | | | | |
| MmugDNA.23412.1.S1_x_at | LOC715553 | similar to Protein PP2447 | Mmu.16050 | XP_001111734 /// | 651.9257 | A | 657.9822 | P |
| | | | | XP_001111774 /// | | | | |
| | | | | XP_001111813 /// | | | | |
| | | | | XP_001111850 /// | | | | |
| | | | | XP_001111878 /// | | | | |
| | | | | XP_001111918 /// | | | | |
| | | | | XP_001111956 | | | | |
| MmuSTS.563.1.S1_at | LOC715706 | Similar to schlafen family member 13 | Mmu.11333 | XP_001114176 /// | 47.03052 | A | 79.03813 | P |
| | | | | XP_001114192 /// | | | | |
| | | | | XP_001114211 | | | | |
| MmugDNA.23724.1.S1_at | LOC715752 | similar to zinc finger protein 44 | Mmu.13185 | XP_001107149 /// | 177.6898 | A | 126.2318 | P |
| | | | | XP_001107204 /// | | | | |
| | | | | XP_001107269 | | | | |
| MmugDNA.30744.1.S1_s_at | LOC715853 | similar to interphase | Mmu.13940 | XP_001113603 | 221.8494 | A | 233.8704 | P |
| | | cyctoplasmic foci protein 45 | | | | | | |
| MmugDNA.11990.1.S1_at | LOC716153 | similar to myelin gene | Mmu.13074 | XP_001106720 | 32.29033 | A | 49.318 | P |
| | | expression factor 2 | | | | | | |
| MmugDNA.17648.1.S1_at | LOC716239 | similar to Pre-B-cell leukemia | Mmu.6054 | — | 117.4557 | A | 180.2829 | P |
| | | transcription factor 2 | | | | | | |
| | | (Homeobox protein PBX2) | | | | | | |
| | | (Protein G17) | | | | | | |
| MmugDNA.40257.1.S1_at | LOC716245 | similar to sphingosine-1- | Mmu.4100 | XP_001106861 | 122.3767 | A | 129.1462 | P |
| | | phosphate lyase 1 | | | | | | |
| MmugDNA.36455.1.S1_at | LOC716351 | similar to SEC22 vesicle | Mmu.14967 | XP_001115262 /// | 162.7943 | A | 137.2903 | P |
| | | trafficking protein homolog C isoform b | | XP_001115277 /// | | | | |
| | | | | XP_001115291 /// | | | | |
| | | | | XP_001115333 /// | | | | |
| | | | | XP_001115349 /// | | | | |
| | | | | XP_001115363 /// | | | | |
| | | | | XP_001115380 | | | | |
| Mmu.8945.1.S1_at | LOC717346 | similar to complement factor H isoform a precursor | Mmu.4677 | XP_001111499 /// | 90.61079 | A | 143.7754 | P |
| | | | | XP_001111535 /// | | | | |
| | | | | XP_001111875 | | | | |
| MmuSTS.2495.1.S1_at | LOC719814 | similar to zinc finger protein 577 | Mmu.15382 | XP_001116472 /// | 105.0435 | A | 110.711 | P |
| | | | | XP_001116485 /// | | | | |
| | | | | XP_001116492 | | | | |
| MmugDNA.11286.1.S1_at | LOC720186 | similar to immunoglobulin | Mmu.11138 | XP_001115307 | 385.697 | A | 568.326 | P |
| | | superfamily, member 8 | | | | | | |
| MmunewRS.138.1.S1_at | LOC721825 | similar to cAMP responsive | Mmu.11710 | XP_001118020 | 87.49419 | A | 151.4151 | P |
| | | element binding protein 3-like 3 | | | | | | |
| MmugDNA.16852.1.S1_at | LTB4R | leukotriene B4 receptor | — | XP_001114016 /// | 97.06477 | A | 171.7247 | P |
| | | | | XP_001114035 | | | | |
| MmugDNA.21143.1.S1_at | MAOA | monoamine oxidase A | Mmu.3283 | XP_001096840 | 127.6487 | A | 274.6833 | P |
| MmugDNA.17553.1.S1_at | MMP19 | matrix metallopeptidase 19 | — | XP_001111542 /// | 95.18174 | A | 216.4568 | P |
| | | | | XP_001111624 | | | | |
| MmugDNA.33389.1.S1_at | MPZL2 | myelin protein zero-like 2 | — | XP_001096977 /// | 93.9895 | A | 109.8271 | P |
| | | | | XP_001097090 | | | | |
| MmugDNA.15929.1.S1_at | MRAS | muscle RAS oncogene homolog | Mmu.14559 | XP_001114261 /// | 44.73249 | A | 105.5022 | P |
| | | | | XP_001114274 /// | | | | |
| | | | | XP_001114299 /// | | | | |
| | | | | XP_001114317 | | | | |
| MmuSTS.4170.1.S1_at | MRAS | muscle RAS oncogene homolog | Mmu.14559 | XP_001114261 /// | 150.9189 | A | 150.6777 | P |
| | | | | XP_001114274 /// | | | | |
| | | | | XP_001114299 /// | | | | |
| | | | | XP_001114317 | | | | |
| MmugDNA.3439.1.S1_at | NEB | nebulin | Mmu.10774 | XP_001084585 | 4.838272 | A | 79.8995 | P |
| MmugDNA.28543.1.S1_at | NR4A2 | Nuclear receptor subfamily 4, group A, member 2 | Mmu.11507 | XP_001085438 /// | 67.00845 | A | 127.2987 | P |
| | | | | XP_001085797 /// | | | | |
| | | | | XP_001085905 /// | | | | |
| | | | | XP_001086011 /// | | | | |
| | | | | XP_001086128 /// | | | | |
| | | | | XP_001086234 /// | | | | |
| | | | | XP_001086356 /// | | | | |
| | | | | XP_001086593 /// | | | | |
| | | | | XP_001086719 | | | | |
| MmugDNA.31823.1.S1_at | PRKACB | protein kinase, cAMP-dependent, catalytic, beta | Mmu.1940 | XP_001105459 /// | 145.2954 | A | 153.0346 | P |
| | | | | XP_001105534 /// | | | | |
| | | | | XP_001105605 /// | | | | |
| | | | | XP_001105676 /// | | | | |
| | | | | XP_001105747 /// | | | | |
| | | | | XP_001105803 /// | | | | |
| | | | | XP_001105875 /// | | | | |
| | | | | XP_001105953 /// | | | | |
| | | | | XP_001106026 /// | | | | |
| | | | | XP_001106097 /// | | | | |
| | | | | XP_001106164 | | | | |
| MmugDNA.7366.1.S1_at | PRKCA | protein kinase C, alpha | Mmu.5709 | — | 168.4086 | A | 185.0983 | P |
| MmugDNA.36754.1.S1_at | PRR3 | proline rich 3 | Mmu.12623 | XP_001100535 | 92.55525 | A | 96.15895 | P |
| MmugDNA.7677.1.S1_at | RBM34 | RNA binding motif protein 34 | Mmu.12653 | XP_001102020 /// | 139.6196 | A | 132.859 | P |
| | | | | XP_001102111 | | | | |
| MmuSTS.3315.1.S1_at | SH3GLB2 | SH3-domain GRB2-like | Mmu.17131 | XP_001109262 | 415.9608 | A | 394.2061 | P |
| | | endophilin B2 | | | | | | |
| MmugDNA.34347.1.S1_s_at | SLC25A13 | solute carrier family 25, | Mmu.11416 | XP_001088340 | 83.63106 | A | 107.3469 | P |
| | | member 13 (citrin) | | | | | | |
| MmugDNA.43541.1.S1_at | SLC25A17 | Solute carrier family 25 | Mmu.4154 | XP_001102293 | 135.3007 | A | 74.23647 | P |
| | | (mitochondrial carrier; | | | | | | |
| | | peroxisomal membrane protein, | | | | | | |
| | | 34 kDa), member 17 | | | | | | |
| MmugDNA.15062.1.S1_at | SSBP1 | Single-stranded DNA binding protein 1 | Mmu.4481 | XP_001084058 /// | 129.9467 | A | 215.4136 | P |
| | | | | XP_001084179 /// | | | | |
| | | | | XP_001084295 /// | | | | |
| | | | | XP_001084414 /// | | | | |
| | | | | XP_001084536 | | | | |
| MmugDNA.9561.1.S1_at | TIMP-2 | tissue inhibitor of matrix | Mmu.1702 | XP_001106657 | 369.0166 | A | 492.1667 | P |
| | | metalloproteinase-2 | | | | | | |
| MmugDNA.502.1.S1_at | TIRAP | toll-interleukin 1 receptor (TIR) | Mmu.17493 | NP_001123907 /// | 205.38 | A | 169.1459 | P |
| | | domain containing adaptor protein | | XP_001112918 /// | | | | |
| | | | | XP_001112950 | | | | |
| MmugDNA.31314.1.S1_at | TMLHE | trimethyllysine hydroxylase, epsilon | Mmu.15229 | XP_001099467 /// | 183.9673 | A | 334.9409 | P |
| | | | | XP_001099575 /// | | | | |
| | | | | XP_001099674 | | | | |
| MmugDNA.86.1.S1_at | TRHDE | thyrotropin-releasing hormone | Mmu.130 | XP_001109391 | 53.7547 | A | 134.5263 | P |
| | | degrading enzyme | | | | | | |
| Mmu.5321.1.S1_at | TTC12 | tetratricopeptide repeat domain 12 | Mmu.13011 | XP_001084384 /// | 108.8476 | A | 113.706 | P |
| | | | | XP_001084508 /// | | | | |
| | | | | XP_001084630 /// | | | | |
| | | | | XP_001084748 /// | | | | |
| | | | | XP_001084868 /// | | | | |
| | | | | XP_001084979 | | | | |
| MmugDNA.33980.1.S1_at | TTLL4 | tubulin tyrosine ligase-like family, member 4 | Mmu.15909 | XP_001094019 /// | 273.2361 | A | 211.3274 | P |
| | | | | XP_001094615 /// | | | | |
| | | | | XP_001094742 /// | | | | |
| | | | | XP_001094864 | | | | |
| MmugDNA.20532.1.S1_at | WDR77 | WD repeat domain 77 | Mmu.4390 | XP_001105103 | 179.0304 | A | 343.9792 | P |
| MmugDNA.33665.1.S1_at | WDR8 | WD repeat domain 8 | Mmu.15190 | XP_001083578 /// | 178.8616 | A | 259.0192 | P |
| | | | | XP_001083787 /// | | | | |
| | | | | XP_001083904 /// | | | | |
| | | | | XP_001084011 | | | | |
| MmugDNA.26867.1.S1_at | XG | Xg blood group | Mmu.11499 | XP_001086077 /// | 29.58194 | A | 40.78949 | P |
| | | | | XP_001086193 | | | | |
| MmugDNA.19387.1.S1_at | ZDHHC3 | zinc finger, DHHC-type containing 3 | Mmu.11811 | XP_001114690 /// | 387.6217 | A | 606.2077 | P |
| | | | | XP_001114737 /// | | | | |
| | | | | XP_001114753 | | | | |
| MmugDNA.42763.1.S1_at | ZFAND5 | zinc finger, AN1-type domain 5 | Mmu.1639 | XP_001096078 /// | 2.943856 | A | 79.52551 | P |
| | | | | XP_001096191 /// | | | | |
| | | | | XP_001096312 /// | | | | |
| | | | | XP_001096433 /// | | | | |
| | | | | XP_001096545 | | | | |
| MmugDNA.29066.1.S1_at | ZNRD1 | zinc ribbon domain containing 1 | Mmu.17470 | NP_001108417 /// | 87.50885 | A | 97.50604 | P |
| | | | | XP_001105355 /// | | | | |
| | | | | XP_001105431 | | | | |

TABLE 2
Differentially expressed genes in PBMCs of NHPs 2-hr following MCAO

| Probe Set ID | Gene Symbol | Gene Title | UniGene ID | First ID Parsed | Pre-O Signal | Pre-O detection | 2-hr Signal | 2-hr detection |
|---|---|---|---|---|---|---|---|---|
| MmugDNA.2736.1.S1_at | C1QA | Complement component 1, q | Mmu.4861 | XP_001101655 | 182.484 | A | 150.6514 | P |
| | | subcomponent, A chain | | | | | | |
| MmugDNA.26392.1.S1_at | CCNF | cyclin F | Mmu.11675 | XP_001085466 | 114.6939 | A | 244.6208 | P |
| MmugDNA.25206.1.S1_at | CDC2 | cell division cycle 2, G1 to S and G2 | Mmu.16170 | XP_001095697 | 83.30299 | A | 74.22997 | P |
| | | to M | | | | | | |
| MmunewRS.528.1.S1_at | CSF2RB | colony stimulating factor 2 receptor, | Mmu.1176 | XP_001086084 | 146.8577 | A | 477.5113 | P |
| | | beta, low-affinity (granulocyte- | | | | | | |
| | | macrophage) | | | | | | |
| Mmu.15973.2.S1_x_at | CSH-3 /// CSH-4 /// | chorionic somatommamotropin | Mmu.10849 | NP_001036203 | 122.2181 | A | 172.7128 | P |
| | GH1 /// | hormone 3 /// chorionic | | | | | | |
| | LOC718474 /// | somatommamotropin hormone 4 /// | | | | | | |
| | LOC721256 /// | growth hormone 1 /// similar to | | | | | | |
| | LOC735307 | growth hormone 1 isoform 1 /// | | | | | | |
| | | similar to growth hormone 1 isoform | | | | | | |
| | | 1 /// chorionic somatomammotropin-1 | | | | | | |
| MmugDNA.5060.1.S1_at | CTNND1 | catenin (cadherin-associated | Mmu.1419 | XP_001094621 | 79.00558 | A | 381.7483 | P |
| | | protein), delta 1 | | | | | | |
| MmugDNA.40586.1.S1_s_at | CYP3A5 /// | cytochrome P450, family 3, subfamily | Mmu.3065 | NP_001035309 | 176.8445 | A | 313.2471 | P |
| | CYP3A64 | A, polypeptide 5 /// cytochrome P450 | | | | | | |
| | | 3A64 | | | | | | |
| MmugDNA.1267.1.S1_s_at | CYP3A64 /// | cytochrome P450 3A64 /// similar to | Mmu.9706 | NP_001035504 | 89.83363 | A | 481.9885 | P |
| | LOC718917 | Cytochrome P450 3A7 (CYPIIIA7) (P450-HFLA) | | | | | | |
| MmugDNA.13802.1.S1_at | DCN | decorin | Mmu.1687 | XP_001103412 | 52.87949 | A | 124.1306 | P |
| MmugDNA.14528.1.S1_s_at | DCN | decorin | Mmu.1687 | XP_001103412 | 107.5135 | A | 183.8077 | P |
| MmugDNA.41798.1.S1_at | DHRS7 | dehydrogenase/reductase (SDR | Mmu.4703 | XP_001095590 | 122.1582 | A | 208.7733 | P |
| | | family) member 7 | | | | | | |
| MmugDNA.620.1.S1_at | ENPP1 | ectonucleotide pyrophosphatase/phosphodiesterase 1 | Mmu.14518 | XP_001103359 | 50.47231 | A | 96.11094 | P |
| MmuSTS.4736.1.S1_at | ERBB3 | v-erb-b2 erythroblastic leukemia viral | Mmu.758 | XP_001113794 | 161.6664 | A | 208.198 | P |
| | | oncogene homolog 3 (avian) | | | | | | |
| MmugDNA.11377.1.S1_s_at | FCAR | Fc fragment of IgA, receptor for | Mmu.3792 | NP_001035039 | 196.9096 | A | 388.9353 | P |
| MmugDNA.33925.1.S1_s_at | FOXP2 | forkhead box P2 | Mmu.4784 | NP_001028193 | 204.0107 | A | 255.1464 | P |
| MmuSTS.4804.1.S1_at | FPR2 | formyl peptide receptor 2 | Mmu.15383 | XP_001116437 | 314.0186 | A | 1280.783 | P |
| MmugDNA.13746.1.S1_s_at | GK | glycerol kinase | Mmu.16427 | XP_001100778 | 21.59358 | A | 114.4026 | P |
| MmugDNA.37125.1.S1_at | GLRB | glycine receptor, beta | Mmu.1658 | XP_001093718 | 140.4933 | A | 274.4669 | P |
| Mmu.11695.1.S1_at | GPR34 | G protein-coupled receptor 34 | Mmu.3224 | XP_001087742 | 146.0326 | A | 147.7894 | P |
| MmuSTS.2489.1.S1_at | GPR77 | G protein-coupled receptor 77 | Mmu.15399 | XP_001112895 | 85.30246 | A | 286.7114 | P |
| MmuSTS.1348.1.S1_at | HOXB7 | homeobox B7 | Mmu.16913 | XP_001088822 | 134.1311 | A | 125.7572 | P |
| MmugDNA.18776.1.S1_at | HPD | 4-hydroxyphenylpyruvate | Mmu.14575 | XP_001096061 | 81.20009 | A | 294.6741 | P |
| | | dioxygenase | | | | | | |
| Mmu.15730.2.S1_at | HSP90AB1 | heat shock 90 kDa protein 1, beta | Mmu.142 | XP_001098219 | 97.19216 | A | 321.4503 | P |
| MmuSTS.681.1.S1_at | IL1RN | interleukin 1 receptor antagonist | Mmu.15827 | XP_001091493 | 108.0968 | A | 635.2902 | P |
| MmugDNA.28970.1.S1_at | IL1RN | interleukin 1 receptor antagonist | Mmu.15827 | XP_001091493 | 126.3157 | A | 511.0923 | P |
| Mmu.9316.1.S1_at | KLF11 | Kruppel-like factor 11 | Mmu.11355 | XP_001090608 | 501.1391 | A | 666.5593 | P |
| Mmu.1906.5.S1_s_at | LOC574146 | NKG2-A | Mmu.3577 | NP_001028001 | 12.69617 | A | 117.3456 | P |
| MmuSTS.1757.1.S1_at | LOC693556 | similar to ras responsive element | Mmu.14828 | XP_001082265 | 109.3152 | A | 232.5773 | P |
| | | binding protein 1 isoform 1 | | | | | | |
| MmugDNA.35637.1.S1_at | LOC694461 | similar to RIO kinase 1 isoform 1 | Mmu.13193 | XP_001084416 | 195.3009 | A | 132.0237 | P |
| MmugDNA.32349.1.S1_at | LOC694620 | similar to regulator of G-protein | Mmu.16259 | XP_001084439 | 49.87419 | A | 160.4138 | P |
| | | signalling 6 | | | | | | |
| MmugDNA.8053.1.S1_at | LOC694961 | Similar to Scm-like with four mbt | Mmu.13251 | XP_001084282 | 111.6069 | A | 141.3901 | P |
| | | domains 1 | | | | | | |
| MmugDNA.7498.1.S1_at | LOC695519 | hypothetical protein LOC695519 | Mmu.14586 | XP_001088156 | 103.4704 | A | 197.977 | P |
| MmugDNA.9916.1.S1_at | LOC696275 | similar to neuregulin 1 isoform HRG- | Mmu.16225 | XP_001085266 | 109.3953 | A | 190.929 | P |
| | | beta1 | | | | | | |
| MmugDNA.20065.1.S1_at | LOC696749 | similar to runt-related transcription | Mmu.14911 | XP_001086266 | 216.7346 | A | 328.7002 | P |
| | | factor 1 isoform a | | | | | | |
| MmugDNA.40590.1.S1_at | LOC696991 | similar to CG13322-PA, isoform A | Mmu.15342 | XP_001090213 | 151.6879 | A | 172.5933 | P |
| MmugDNA.23596.1.S1_at | LOC697028 | similar to dedicator of cytokinesis 7 | Mmu.4738 | XP_001085641 | 42.86666 | A | 115.8433 | P |
| MmugDNA.19209.1.S1_s_at | LOC697208 | similar to Neutrophil gelatinase- | Mmu.11352 | XP_001083008 | 87.27077 | A | 98.78687 | P |
| | | associated lipocalin precursor (NGAL) | | | | | | |
| | | (p25) (25 kDa alpha-2-microglobulin-related | | | | | | |
| | | subunit of MMP-9) (Lipocalin-2) (Oncogene 24p3) | | | | | | |
| MmugDNA.34368.1.S1_at | LOC698257 | hypothetical protein LOC698257 | Mmu.14406 | XP_001091064 | 35.19047 | A | 47.13095 | P |
| MmugDNA.8688.1.S1_s_at | LOC698576 | similar to plakophilin 4 isoform a | Mmu.90 | XP_001090763 | 57.58762 | A | 168.3497 | P |
| MmugDNA.25652.1.S1_at | LOC698610 | similar to netrin-G1 ligand | Mmu.14852 | XP_001090221 | 159.8217 | A | 530.5047 | P |
| MmugDNA.7880.1.S1_at | LOC698922 | similar to transcription elongation | Mmu.1273 | XP_001087401 | 67.81429 | A | 124.0317 | P |
| | | factor B (SIII), polypeptide 1 | | | | | | |
| MmugDNA.30038.1.S1_at | LOC699233 | similar to J domain protein C21orf55 | Mmu.14908 | XP_001091149 | 20.38795 | A | 98.65044 | P |
| MmugDNA.6969.1.S1_s_at | LOC700634 | similar to PTK2 protein tyrosine | Mmu.3254 | XP_001091188 | 318.6551 | A | 400.0713 | P |
| | | kinase 2 isoform a | | | | | | |
| MmugDNA.11282.1.S1_at | LOC700766 | similar to CG14299-PA, isoform A | Mmu.13220 | XP_001089105 | 102.762 | A | 100.7975 | P |
| MmuSTS.1092.1.S1_at | LOC701162 | similar to solute carrier family 6, | Mmu.11269 | XP_001099500 | 62.05202 | A | 153.328 | P |
| | | member 17 | | | | | | |
| MmugDNA.24847.1.S1_at | LOC701547 | similar to glycine-N-acyltransferase- | Mmu.14222 | XP_001092072 | 104.8917 | A | 110.6059 | P |
| | | like 1 | | | | | | |
| MmugDNA.12356.1.S1_at | LOC702392 | similar to peroxin1 | Mmu.13262 | XP_001100851 | 267.6477 | A | 260.6007 | P |
| MmugDNA.30120.1.S1_at | LOC702596 | similar to nucleolar RNA-associated | Mmu.15669 | XP_001099108 | 517.206 | A | 746.5876 | P |
| | | protein alpha isoform | | | | | | |
| MmugDNA.18234.1.S1_s_at | LOC703331 | similar to runt-related transcription | Mmu.14787 | XP_001100592 | 58.99397 | A | 143.8091 | P |
| | | factor 2 isoform b | | | | | | |
| MmugDNA.42623.1.S1_at | LOC703350 | Similar to SLD5 | Mmu.12445 | XP_001094432 | 116.1626 | A | 145.9785 | P |
| MmugDNA.28192.1.S1_at | LOC703449 | similar to solute carrier family 22 | Mmu.14760 | XP_001098823 | 85.29906 | A | 81.56317 | P |
| | | member 1 isoform a | | | | | | |
| MmugDNA.18415.1.S1_at | LOC703912 | similar to zinc-finger protein NOLZ1 | Mmu.16177 | XP_001095490 | 66.7701 | A | 146.8729 | P |
| MmugDNA.20879.1.S1_at | LOC703981 | similar to NOD9 protein isoform 1 | Mmu.15714 | XP_001104018 | 68.5675 | A | 154.5716 | P |
| MmugDNA.43058.1.S1_at | LOC704126 | similar to kinesin family member 13A | Mmu.14823 | XP_001096456 | 240.8623 | A | 408.3128 | P |
| MmugDNA.36952.1.S1_at | LOC704226 | similar to metallophosphoesterase 1 | Mmu.1901 | XP_001095099 | 181.1201 | A | 250.6874 | P |
| | | precursor | | | | | | |
| MmugDNA.32338.1.S1_at | LOC704620 | Hypothetical protein LOC704620 | Mmu.12860 | XP_001092983 | 484.9445 | A | 1224.313 | P |
| MmugDNA.32288.1.S1_at | LOC705099 | similar to IBR domain containing 2 | Mmu.13564 | XP_001097834 | 169.2173 | A | 387.3177 | P |
| MmugDNA.13807.1.S1_at | LOC705221 | similar to CD2-associated protein | Mmu.14706 | XP_001103871 | 101.1595 | A | 127.5952 | P |
| MmugDNA.32676.1.S1_at | LOC705267 | similar to mitochondrial ribosomal | Mmu.4582 | XP_001093640 | 81.411 | A | 115.9029 | P |
| | | protein S5 | | | | | | |
| MmugDNA.3813.1.S1_at | LOC705358 | similar to PDZ and LIM domain 5 | Mmu.11535 | XP_001102789 | 196.3453 | A | 221.204 | P |
| | | isoform a | | | | | | |
| MmugDNA.41256.1.S1_at | LOC705369 | similar to SET domain containing 3 | Mmu.12527 | XP_001103146 | 307.612 | A | 241.3948 | P |
| MmugDNA.32069.1.S1_at | LOC705781 | similar to CG10721-PA | Mmu.11312 | XP_001098386 | 139.6408 | A | 183.3221 | P |
| MmugDNA.7008.1.S1_at | LOC705781 | similar to CG10721-PA | Mmu.11312 | XP_001098386 | 257.4816 | A | 322.0098 | P |
| MmugDNA.11389.1.S1_at | LOC705913 | similar to cytidine deaminase | Mmu.14713 | XP_001096632 | 157.2027 | A | 447.3467 | P |
| MmugDNA.31582.1.S1_at | LOC706263 | similar to potassium voltage-gated | Mmu.15899 | XP_001108426 | 64.51572 | A | 122.4288 | P |
| | | channel, Isk-related family, member 4 | | | | | | |
| MmugDNA.16996.1.S1_at | LOC706417 | similar to rap2 interacting protein x | Mmu.3060 | XP_001105219 | 77.67221 | A | 92.12048 | P |
| | | isoform 2 | | | | | | |
| MmugDNA.24929.1.S1_at | LOC707355 | similar to zinc finger protein 672 | Mmu.15300 | XP_001105495 | 160.5896 | A | 210.3326 | P |
| MmugDNA.21203.1.S1_x_at | LOC707383 | similar to amyloid beta (A4) | Mmu.669 | XP_001101993 | 428.4578 | A | 421.7363 | P |
| | | precursor protein-binding, family B, | | | | | | |
| | | member 1 interacting protein | | | | | | |
| MmugDNA.35674.1.S1_at | LOC707661 | similar to additional sex combs like 1 | Mmu.15484 | XP_001101400 | 110.2575 | A | 154.5192 | P |
| MmugDNA.14411.1.S1_at | LOC707686 | similar to angiogenic factor VG5Q | Mmu.12022 | XP_001106588 | 312.2592 | A | 323.3734 | P |
| MmuSTS.1472.1.S1_at | LOC707739 | Similar to serine/threonine protein | Mmu.12485 | XP_001096161 | 31.29481 | A | 62.03861 | P |
| | | kinase MASK | | | | | | |
| MmugDNA.6011.1.S1_at | LOC707982 /// | similar to rhomboid domain | Mmu.15898 | XP_001110015 | 253.2026 | A | 501.7335 | P |
| | LOC708189 | containing 1 /// hypothetical protein | | | | | | |
| | | LOC708189 | | | | | | |
| MmuSTS.4837.1.S1_at | LOC708940 | similar to Guanine nucleotide-binding | Mmu.14862 | XP_001108555 | 67.89697 | A | 97.95885 | P |
| | | protein G(i), alpha-1 subunit | | | | | | |
| | | (Adenylate cyclase-inhibiting G alpha | | | | | | |
| | | protein) | | | | | | |
| MmuSTS.508.1.S1_at | LOC709049 | similar to activating signal | Mmu.14734 | XP_001105587 | 145.0563 | A | 157.3825 | P |
| | | cointegrator 1 complex subunit 1 | | | | | | |
| MmugDNA.32637.1.S1_at | LOC709253 | similar to nucleosomal binding | Mmu.13802 | XP_001103630 | 80.94846 | A | 62.59929 | P |
| | | protein 1 | | | | | | |
| MmugDNA.38015.1.S1_at | LOC709468 | similar to terminal | Mmu.12395 | XP_001107131 | 75.45173 | A | 95.06112 | P |
| | | deoxynucleotidyltransferase | | | | | | |
| | | interacting factor 1 | | | | | | |
| Mmu.10346.1.S1_at | LOC709544 | hypothetical protein LOC709544 | Mmu.16556 | XP_001096738 | 507.0977 | A | 355.7336 | P |
| MmugDNA.39938.1.S1_at | LOC709882 | similar to Troponin T, cardiac muscle | Mmu.14101 | XP_001098451 | 129.6782 | A | 195.8546 | P |
| | | (TnTc) (Cardiac muscle troponin T) | | | | | | |
| | | (cTnT) | | | | | | |
| MmugDNA.26478.1.S1_at | LOC710518 | similar to mitochondrial solute | Mmu.11000 | XP_001105927 | 455.317 | A | 1481.092 | P |
| | | carrier-like protein | | | | | | |
| MmugDNA.33876.1.S1_s_at | LOC711336 | similar to olfactomedin 2 | Mmu.15445 | XP_001099531 | 105.1338 | A | 181.6893 | P |
| MmugDNA.17217.1.S1_at | LOC711485 | similar to acyl-Coenzyme A | Mmu.12959 | XP_001109931 | 123.1174 | A | 379.9161 | P |
| | | dehydrogenase, long chain precursor | | | | | | |
| MmugDNA.15166.1.S1_at | LOC711633 | similar to zinc finger CCCH-type | Mmu.15988 | XP_001114089 | 185.2786 | A | 231.699 | P |
| | | containing 10 | | | | | | |
| MmuSTS.4200.1.S1_at | LOC711691 | Similar to pre-B-cell leukemia | Mmu.4832 | XP_001100529 | 105.6631 | A | 901.0759 | P |
| | | transcription factor 3 | | | | | | |
| Mmu.13564.1.S1_at | LOC711742 | similar to kinesin family member 9 | Mmu.564 | XP_001113416 | 8.346619 | A | 81.96733 | P |
| | | isoform 2 | | | | | | |
| MmugDNA.43479.1.S1_at | LOC711908 | similar to transmembrane 4 | Mmu.2535 | XP_001108758 | 8.667226 | A | 94.85152 | P |
| | | superfamily member 1 | | | | | | |
| MmugDNA.30723.1.S1_at | LOC711984 | Similar to zinc finger CCCH-type | Mmu.12594 | XP_001106124 | 175.1743 | A | 338.943 | P |
| | | domain containing 7 | | | | | | |
| MmugDNA.20892.1.S1_at | LOC712033 | similar to PCTAIRE protein kinase 1 | Mmu.14735 | XP_001100911 | 120.9395 | A | 203.3945 | P |
| MmugDNA.12728.1.S1_at | LOC712272 | similar to fibronectin type 3 and SPRY | Mmu.13034 | XP_001109699 | 37.6952 | A | 88.71973 | P |
| | | domain-containing protein | | | | | | |
| MmugDNA.1324.1.S1_s_at | LOC712600 | similar to quaking homolog, KH | Mmu.2689 | XP_001101642 | 109.0662 | A | 111.2004 | P |
| | | domain RNA binding isoform HQK-5 | | | | | | |
| MmugDNA.12133.1.S1_at | LOC713035 | similar to BCL2-like 1 isoform 1 | Mmu.16103 | XP_001109879 | 159.8234 | A | 120.8184 | P |
| MmugDNA.2816.1.S1_s_at | LOC713680 | similar to Protein C9orf7 | Mmu.11422 | XP_001100751 | 178.9342 | A | 371.2914 | P |
| MmugDNA.23412.1.S1_x_at | LOC715553 | similar to Protein PP2447 | Mmu.16050 | XP_001111734 | 651.9257 | A | 974.2084 | P |
| MmuSTS.563.1.S1_at | LOC715706 | Similar to schlafen family member 13 | Mmu.11333 | XP_001114176 | 47.03052 | A | 109.2105 | P |
| MmugDNA.40257.1.S1_at | LOC716245 | similar to sphingosine-1-phosphate | Mmu.4100 | XP_001106861 | 122.3767 | A | 155.0102 | P |
| | | lyase 1 | | | | | | |
| MmugDNA.36455.1.S1_at | LOC716351 | similar to SEC22 vesicle trafficking | Mmu.14967 | XP_001115262 | 162.7943 | A | 203.9004 | P |
| | | protein homolog C isoform b | | | | | | |
| MmugDNA.2703.1.S1_at | LOC716903 | hypothetical protein LOC716903 | Mmu.15043 | XP_001115326 | 21.5953 | A | 72.00944 | P |
| Mmu.8945.1.S1_at | LOC717346 | similar to complement factor H | Mmu.4677 | XP_001111499 | 90.61079 | A | 186.3635 | P |
| | | isoform a precursor | | | | | | |
| MmugDNA.22554.1.S1_s_at | LOC717764 | similar to phospholipase C, beta 3 | Mmu.11823 | XP_001115104 | 294.9439 | A | 257.2195 | P |
| | | (phosphatidylinositol-specific) | | | | | | |
| MmugDNA.41138.1.S1_at | LOC717824 | similar to mago-nashi homolog | Mmu.2413 | XP_001115401 | 56.18679 | A | 108.1663 | P |
| MmugDNA.8485.1.S1_at | LOC719645 | similar to H326 | Mmu.153 | XP_001117421 | 55.48396 | A | 122.239 | P |
| MmuSTS.2495.1.S1_at | LOC719814 | similar to zinc finger protein 577 | Mmu.15382 | XP_001116472 | 105.0435 | A | 132.2027 | P |
| MmugDNA.11286.1.S1_at | LOC720186 | similar to immunoglobulin | Mmu.11138 | XP_001115307 | 385.697 | A | 486.4542 | P |
| | | superfamily, member 8 | | | | | | |
| MmugDNA.1499.1.S1_at | LOC721262 | similar to Pigment epithelium-derived | Mmu.12605 | XP_001117361 | 90.36726 | A | 283.4944 | P |
| | | factor precursor (PEDF) (EPC-1) | | | | | | |
| MmugDNA.16852.1.S1_at | LTB4R | leukotriene B4 receptor | — | XP_001114016 | 97.06477 | A | 397.0128 | P |
| MmugDNA.21143.1.S1_at | MAOA | monoamine oxidase A | Mmu.3283 | XP_001096840 | 127.6487 | A | 386.7567 | P |
| MmugDNA.20648.1.S1_at | MFAP3 | microfibrillar-associated protein 3 | Mmu.1139 | XP_001102567 | 209.1429 | A | 191.3753 | P |
| MmugDNA.17553.1.S1_at | MMP19 | matrix metallopeptidase 19 | — | XP_001111542 | 95.18174 | A | 126.3377 | P |
| MmuSTS.4170.1.S1_at | MRAS | muscle RAS oncogene homolog | Mmu.14559 | XP_001114261 | 150.9189 | A | 140.7781 | P |
| MmugDNA.13215.1.S1_at | MYO5B | myosin VB | Mmu.15475 | XP_001090434 | 76.57364 | A | 115.3176 | P |
| MmugDNA.26632.1.S1_at | NMNAT3 | nicotinamide nucleotide | Mmu.14941 | XP_001113328 | 100.2686 | A | 157.8669 | P |
| | | adenylyltransferase 3 | | | | | | |
| MmugDNA.28543.1.S1_at | NR4A2 | Nuclear receptor subfamily 4, group | Mmu.11507 | XP_001085438 | 67.00845 | A | 47.1474 | P |
| | | A, member 2 | | | | | | |
| Mmu.14635.1.S1_s_at | P11 | placental protein 11 | Mmu.1192 | XP_001097398 | 3.029125 | A | 85.42168 | P |
| MmugDNA.7677.1.S1_at | RBM34 | RNA binding motif protein 34 | Mmu.12653 | XP_001102020 | 139.6196 | A | 191.8863 | P |
| MmugDNA.17401.1.S1_at | SEC24A | SEC24 family, member A (S. cerevisiae) | Mmu.13387 | XP_001109569 | 32.50195 | A | 145.5821 | P |
| MmugDNA.34347.1.S1_s_at | SLC25A13 | solute carrier family 25, member 13 | Mmu.11416 | XP_001088340 | 83.63106 | A | 83.29261 | P |
| | | (citrin) | | | | | | |
| MmugDNA.15062.1.S1_at | SSBP1 | Single-stranded DNA binding protein 1 | Mmu.4481 | XP_001084058 | 129.9467 | A | 251.779 | P |
| MmugDNA.26812.1.S1_at | ST8SIA4 | ST8 alpha-N-acetyl-neuraminide | Mmu.13440 | XP_001097339 | 135.5056 | A | 100.6624 | P |
| | | alpha-2,8-sialyltransferase 4 | | | | | | |
| MmugDNA.9561.1.S1_at | TIMP-2 | tissue inhibitor of matrix | Mmu.1702 | XP_001106657 | 369.0166 | A | 579.6535 | P |
| | | metalloproteinase-2 | | | | | | |
| MmugDNA.86.1.S1_at | TRHDE | thyrotropin-releasing hormone | Mmu.130 | XP_001109391 | 53.7547 | A | 145.0238 | P |
| | | degrading enzyme | | | | | | |
| Mmu.5321.1.S1_at | TTC12 | tetratricopeptide repeat domain 12 | Mmu.13011 | XP_001084384 | 108.8476 | A | 283.5953 | P |
| MmugDNA.33980.1.S1_at | TTLL4 | tubulin tyrosine ligase-like family, | Mmu.15909 | XP_001094019 | 273.2361 | A | 188.5919 | P |
| | | member 4 | | | | | | |
| MmugDNA.20532.1.S1_at | WDR77 | WD repeat domain 77 | Mmu.4390 | XP_001105103 | 179.0304 | A | 608.6301 | P |
| MmugDNA.33665.1.S1_at | WDR8 | WD repeat domain 8 | Mmu.15190 | XP_001083578 | 178.8616 | A | 467.1802 | P |
| MmugDNA.19387.1.S1_at | ZDHHC3 | zinc finger, DHHC-type containing 3 | Mmu.11811 | XP_001114690 | 387.6217 | A | 769.4366 | P |
| MmugDNA.42763.1.S1_at | ZFAND5 | zinc finger, AN1-type domain 5 | Mmu.1639 | XP_001096078 | 2.943856 | A | 141.202 | P |

TABLE 3
Differentially expressed genes in PBMCs of NHPs 24-hr following MCAO

| Probe Set ID | Gene Symbol | Gene Title | UniGene ID | RefSeq Protein ID | Pre-O Signal | Pre-O detection | 24 hr Signal | 24-hr detection |
|---|---|---|---|---|---|---|---|---|
| MmuSTS.3785.1.S1_at | AGT | angiotensinogen | Mmu.11931 | XP_001107315 /// | 53.05984 | A | 121.1526 | P |
| | | | | XP_001107374 | | | | |
| MmugDNA.18724.1.S1_s_at | B4GALT6 | UDP-Gal:betaGlcNAc beta 1,4- | Mmu.604 | XP_001099215 /// | 58.75183 | A | 80.2387 | P |
| | | galactosyltransferase, | | XP_001099324 /// | | | | |
| | | polypeptide 6 | | XP_001099421 | | | | |
| Mmu.7394.1.A1_at | BXDC1 | Brix domain containing 1 | Mmu.2348 | XP_001087115 | 93.25996 | A | 98.8365 | P |
| MmugDNA.2736.1.S1_at | C1QA | Complement component 1, q | Mmu.4861 | XP_001101655 /// | 182.484 | A | 177.6559 | P |
| | | subcomponent, A chain | | XP_001101750 /// | | | | |
| | | | | XP_001101837 /// | | | | |
| | | | | XP_001101933 | | | | |
| MmugDNA.26392.1.S1_at | CCNF | cyclin F | Mmu.11675 | XP_001085466 | 114.6939 | A | 287.1454 | P |
| MmugDNA.25206.1.S1_at | CDC2 | cell division cycle 2, G1 to S and | Mmu.16170 | XP_001095697 /// | 83.30299 | A | 82.88945 | P |
| | | G2 to M | | XP_001095798 /// | | | | |
| | | | | XP_001095903 | | | | |
| Mmu.10362.1.S1_at | CLIC4 | chloride intracellular channel 4 | Mmu.4332 | XP_001106291 /// | 131.4646 | A | 115.3725 | P |
| | | | | XP_001106424 /// | | | | |
| | | | | XP_001106485 | | | | |
| MmuSTS.1884.1.S1_at | CREM | cAMP responsive element | Mmu.2805 | XP_001088641 /// | 144.2539 | A | 153.9597 | P |
| | | modulator | | XP_001088747 /// | | | | |
| | | | | XP_001088981 /// | | | | |
| | | | | XP_001089092 /// | | | | |
| | | | | XP_001089667 /// | | | | |
| | | | | XP_001090015 /// | | | | |
| | | | | XP_001090136 /// | | | | |
| | | | | XP_001090248 /// | | | | |
| | | | | XP_001090366 /// | | | | |
| | | | | XP_001090477 /// | | | | |
| | | | | XP_001090595 /// | | | | |
| | | | | XP_001090829 /// | | | | |
| | | | | XP_001091190 /// | | | | |
| | | | | XP_001091309 /// | | | | |
| | | | | XP_001091547 /// | | | | |
| | | | | XP_001091662 /// | | | | |
| | | | | XP_001092258 /// | | | | |
| | | | | XP_001092367 /// | | | | |
| | | | | XP_001092480 /// | | | | |
| | | | | XP_001092602 /// | | | | |
| | | | | XP_001092837 /// | | | | |
| | | | | XP_001092950 /// | | | | |
| | | | | XP_001093063 /// | | | | |
| | | | | XP_001093168 | | | | |
| MmugDNA.1202.1.S1_at | CRKL | V-crk sarcoma virus CT10 | Mmu.12764 | XP_001086006 /// | 92.14868 | A | 181.7126 | P |
| | | oncogene homolog (avian)-like | | XP_001086123 | | | | |
| MmunewRS.528.1.S1_at | CSF2RB | colony stimulating factor 2 | Mmu.1176 | XP_001086084 | 146.8577 | A | 237.7413 | P |
| | | receptor, beta, low-affinity | | | | | | |
| | | (granulocyte-macrophage) | | | | | | |
| Mmu.15973.2.S1_x_at | CSH-3 /// | chorionic somatommamotropin | Mmu.10849 | NP_001036203 /// | 122.2181 | A | 167.5703 | P |
| | CSH-4 /// | hormone 3 /// chorionic | | NP_001036207 /// | | | | |
| | GH1 /// | somatommamotropin hormone 4 | | NP_001040618 /// | | | | |
| | LOC718474 | /// growth hormone 1 /// similar | | NP_001040620 /// | | | | |
| | /// | to growth hormone 1 isoform 1 | | XP_001111200 /// | | | | |
| | LOC721256 | /// similar to growth hormone 1 | | XP_001116436 /// | | | | |
| | /// | isoform 1 /// chorionic | | XP_001117351 | | | | |
| | LOC735307 | somatomammotropin-1 | | | | | | |
| MmugDNA.5060.1.S1_at | CTNND1 | catenin (cadherin-associated | Mmu.1419 | XP_001094621 /// | 79.00558 | A | 247.8638 | P |
| | | protein), delta 1 | | XP_001095087 /// | | | | |
| | | | | XP_001095314 /// | | | | |
| | | | | XP_001095429 /// | | | | |
| | | | | XP_001095545 /// | | | | |
| | | | | XP_001095646 /// | | | | |
| | | | | XP_001095745 /// | | | | |
| | | | | XP_001095859 /// | | | | |
| | | | | XP_001095967 /// | | | | |
| | | | | XP_001096070 /// | | | | |
| | | | | XP_001096183 /// | | | | |
| | | | | XP_001096303 /// | | | | |
| | | | | XP_001096427 /// | | | | |
| | | | | XP_001096539 /// | | | | |
| | | | | XP_001096644 /// | | | | |
| | | | | XP_001096747 /// | | | | |
| | | | | XP_001096864 /// | | | | |
| | | | | XP_001096974 /// | | | | |
| | | | | XP_001097086 /// | | | | |
| | | | | XP_001097202 /// | | | | |
| | | | | XP_001097299 /// | | | | |
| | | | | XP_001097408 /// | | | | |
| | | | | XP_001097505 /// | | | | |
| | | | | XP_001097599 /// | | | | |
| | | | | XP_001097712 /// | | | | |
| | | | | XP_001097810 /// | | | | |
| | | | | XP_001097908 /// | | | | |
| | | | | XP_001097998 /// | | | | |
| | | | | XP_001098090 /// | | | | |
| | | | | XP_001098194 /// | | | | |
| | | | | XP_001098301 /// | | | | |
| | | | | XP_001098398 /// | | | | |
| | | | | XP_001098491 /// | | | | |
| | | | | XP_001098588 /// | | | | |
| | | | | XP_001098689 /// | | | | |
| | | | | XP_001098792 /// | | | | |
| | | | | XP_001098897 /// | | | | |
| | | | | XP_001098993 /// | | | | |
| | | | | XP_001099102 /// | | | | |
| | | | | XP_001099203 /// | | | | |
| | | | | XP_001099314 /// | | | | |
| | | | | XP_001099411 /// | | | | |
| | | | | XP_001099522 /// | | | | |
| | | | | XP_001099613 /// | | | | |
| | | | | XP_001099715 /// | | | | |
| | | | | XP_001099819 /// | | | | |
| | | | | XP_001099920 | | | | |
| MmugDNA.40586.1.S1_s_at | CYP3A5 /// | cytochrome P450, family 3, | Mmu.3065 | NP_001035309 /// | 176.8445 | A | 370.1329 | P |
| | CYP3A64 | subfamily A, polypeptide 5 /// | | NP_001035504 /// | | | | |
| | | cytochrome P450 3A64 | | XP_001096666 /// | | | | |
| | | | | XP_001097621 /// | | | | |
| | | | | XP_001097930 | | | | |
| MmugDNA.1267.1.S1_s_at | CYP3A64 /// | cytochrome P450 3A64 /// | Mmu.9706 | NP_001035504 /// | 89.83363 | A | 267.5797 | P |
| | LOC718917 | similar to Cytochrome P450 3A7 | | XP_001097930 /// | | | | |
| | | (CYPIIIA7) (P450-HFLA) | | XP_001112281 | | | | |
| MmugDNA.36232.1.S1_at | DAB2 | disabled homolog 2 | Mmu.12958 | XP_001084792 | 72.17534 | A | 157.0555 | P |
| MmugDNA.41396.1.S1_at | DAB2 | disabled homolog 2 | Mmu.12958 | XP_001084792 | 86.95129 | A | 159.1484 | P |
| MmugDNA.13802.1.S1_at | DCN | decorin | Mmu.1687 | XP_001103412 /// | 52.87949 | A | 70.88836 | P |
| | | | | XP_001103495 /// | | | | |
| | | | | XP_001103577 /// | | | | |
| | | | | XP_001103663 /// | | | | |
| | | | | XP_001103749 /// | | | | |
| | | | | XP_001103834 /// | | | | |
| | | | | XP_001103918 /// | | | | |
| | | | | XP_001104009 /// | | | | |
| | | | | XP_001104095 /// | | | | |
| | | | | XP_001104178 /// | | | | |
| | | | | XP_001104261 /// | | | | |
| | | | | XP_001104340 | | | | |
| MmugDNA.14528.1.S1_s_at | DCN | decorin | Mmu.1687 | XP_001103412 /// | 107.5135 | A | 179.9101 | P |
| | | | | XP_001103495 /// | | | | |
| | | | | XP_001103577 /// | | | | |
| | | | | XP_001103663 /// | | | | |
| | | | | XP_001103749 /// | | | | |
| | | | | XP_001103834 /// | | | | |
| | | | | XP_001103918 /// | | | | |
| | | | | XP_001104009 /// | | | | |
| | | | | XP_001104095 /// | | | | |
| | | | | XP_001104178 /// | | | | |
| | | | | XP_001104261 /// | | | | |
| | | | | XP_001104340 | | | | |
| MmugDNA.22700.1.S1_at | DCN | decorin | Mmu.1687 | XP_001103412 /// | 120.1081 | A | 301.5998 | P |
| | | | | XP_001103495 /// | | | | |
| | | | | XP_001103577 /// | | | | |
| | | | | XP_001103663 /// | | | | |
| | | | | XP_001103749 /// | | | | |
| | | | | XP_001103834 /// | | | | |
| | | | | XP_001103918 /// | | | | |
| | | | | XP_001104009 /// | | | | |
| | | | | XP_001104095 /// | | | | |
| | | | | XP_001104178 /// | | | | |
| | | | | XP_001104261 /// | | | | |
| | | | | XP_001104340 | | | | |
| MmugDNA.41798.1.S1_at | DHRS7 | dehydrogenase/reductase (SDR | Mmu.4703 | XP_001095590 /// | 122.1582 | A | 206.1407 | P |
| | | family) member 7 | | XP_001095688 /// | | | | |
| | | | | XP_001095790 | | | | |
| MmugDNA.30768.1.S1_at | DOCK6 | dedicator of cytokinesis 6 | Mmu.14293 | XP_001106785 | 19.43518 | A | 178.1556 | P |
| MmugDNA.26154.1.S1_at | DRD2 | dopamine receptor D2 | Mmu.3401 | XP_001085336 /// | 94.5069 | A | 196.3607 | P |
| | | | | XP_001085449 /// | | | | |
| | | | | XP_001085571 | | | | |
| Mmu.10947.1.A1_at | DUSP3 | Dual specificity phosphatase 3 | Mmu.11380 | XP_001113728 /// | 98.48205 | A | 192.5923 | P |
| | | | | XP_001113754 | | | | |
| MmugDNA.26188.1.S1_at | ECEL1 | endothelin converting enzyme- | Mmu.11796 | XP_001117070 | 178.3571 | A | 167.7575 | P |
| | | like 1 | | | | | | |
| MmugDNA.32487.1.S1_s_at | ELA3B | elastase 3B | Mmu.3417 | XP_001099601 | 53.45941 | A | 207.1332 | P |
| MmugDNA.38477.1.S1_at | ELK4 | ELK4, ETS-domain protein (SRF | — | XP_001087748 | 144.6712 | A | 96.148 | P |
| | | accessory protein 1) | | | | | | |
| MmugDNA.620.1.S1_at | ENPP1 | ectonucleotide | Mmu.14518 | XP_001103359 | 50.47231 | A | 103.8725 | P |
| | | pyrophosphatase/phosphodiesterase 1 | | | | | | |
| MmugDNA.27688.1.S1_at | EPOR | erythropoietin receptor | — | XP_001105833 | 188.3416 | A | 259.7 | P |
| MmugDNA.10912.1.S1_at | ERBB3 | v-erb-b2 erythroblastic leukemia | Mmu.758 | XP_001113794 /// | 103.4474 | A | 195.9001 | P |
| | | viral oncogene homolog 3 | | XP_001113900 /// | | | | |
| | | (avian) | | XP_001113928 /// | | | | |
| | | | | XP_001113953 | | | | |
| MmuSTS.4736.1.S1_at | ERBB3 | v-erb-b2 erythroblastic leukemia | Mmu.758 | XP_001113794 /// | 161.6664 | A | 289.3541 | P |
| | | viral oncogene homolog 3 | | XP_001113900 /// | | | | |
| | | (avian) | | XP_001113928 /// | | | | |
| | | | | XP_001113953 | | | | |
| MmuSTS.2627.1.S1_at | EXTL1 | exostoses (multiple)-like 1 | Mmu.15170 | XP_001108035 /// | 62.74446 | A | 177.0561 | P |
| | | | | XP_001108149 /// | | | | |
| | | | | XP_001108202 | | | | |
| MmugDNA.18128.1.S1_at | F7 | coagulation factor VII | Mmu.11080 | NP_001073605 /// | 95.21188 | A | 208.6877 | P |
| | | | | XP_001118128 | | | | |
| MmugDNA.11377.1.S1_s_at | FCAR | Fc fragment of IgA, receptor for | Mmu.3792 | NP_001035039 | 196.9096 | A | 296.4183 | P |
| MmugDNA.19608.1.S1_at | FGB | fibrinogen beta chain | Mmu.11581 | XP_001091417 /// | 35.28459 | A | 142.7827 | P |
| | | | | XP_001091760 /// | | | | |
| | | | | XP_001091882 /// | | | | |
| | | | | XP_001091998 | | | | |
| MmuSTS.4781.1.S1_at | FKBP10 | FK506 binding protein 10, 65 kDa | Mmu.14407 | XP_001107581 /// | 144.692 | A | 206.9655 | P |
| | | | | XP_001107638 /// | | | | |
| | | | | XP_001107696 /// | | | | |
| | | | | XP_001107756 /// | | | | |
| | | | | XP_001107821 | | | | |
| MmugDNA.33925.1.S1_s_at | FOXP2 | forkhead box P2 | Mmu.4784 | NP_001028193 | 204.0107 | A | 286.409 | P |
| MmuSTS.4804.1.S1_at | FPR2 | formyl peptide receptor 2 | Mmu.15383 | XP_001116437 /// | 314.0186 | A | 738.5731 | P |
| | | | | XP_001116445 /// | | | | |
| | | | | XP_001116452 | | | | |
| MmuSTS.4807.1.S1_at | FUT3 | fucosyltransferase 3 (galactoside | Mmu.11521 | XP_001085818 /// | 130.1834 | A | 194.3972 | P |
| | | 3(4)-L-fucosyltransferase, Lewis | | XP_001085924 | | | | |
| | | blood group) | | | | | | |
| MmuSTS.4814.1.S1_at | GABRE | gamma-aminobutyric acid | Mmu.15237 | XP_001093070 /// | 61.50348 | A | 144.2998 | P |
| | | (GABA) A receptor, epsilon | | XP_001093507 /// | | | | |
| | | | | XP_001093628 /// | | | | |
| | | | | XP_001093865 | | | | |
| MmugDNA.22053.1.S1_at | GGCX | gamma-glutamyl carboxylase | Mmu.13911 | XP_001086016 /// | 309.7049 | A | 434.7215 | P |
| | | | | XP_001086474 | | | | |
| MmugDNA.13746.1.S1_s_at | GK | glycerol kinase | Mmu.16427 | XP_001100778 /// | 21.59358 | A | 147.123 | P |
| | | | | XP_001100861 /// | | | | |
| | | | | XP_001100968 | | | | |
| MmugDNA.37125.1.S1_at | GLRB | glycine receptor, beta | Mmu.1658 | XP_001093718 /// | 140.4933 | A | 260.0455 | P |
| | | | | XP_001093832 | | | | |
| Mmu.8905.1.S1_at | GPD1 | glycerol-3-phosphate | Mmu.3010 | XP_001102726 | 70.93366 | A | 227.4083 | P |
| | | dehydrogenase 1 (soluble) | | | | | | |
| Mmu.11695.1.S1_at | GPR34 | G protein-coupled receptor 34 | Mmu.3224 | XP_001087742 /// | 146.0326 | A | 141.9543 | P |
| | | | | XP_001087858 /// | | | | |
| | | | | XP_001087981 /// | | | | |
| | | | | XP_001088105 | | | | |
| MmuSTS.2489.1.S1_at | GPR77 | G protein-coupled receptor 77 | Mmu.15399 | XP_001112895 /// | 85.30246 | A | 324.2143 | P |
| | | | | XP_001112923 /// | | | | |
| | | | | XP_001112956 | | | | |
| MmugDNA.19343.1.S1_s_at | HBG2 | hemoglobin, gamma G | Mmu.2134 | NP_001040611 /// | 36.8732 | A | 92.44987 | P |
| | | | | XP_001111590 | | | | |
| MmugDNA.7761.1.S1_at | HIPK2 | homeodomain interacting protein | Mmu.4514 | XP_001106719 | 112.2257 | A | 349.4229 | P |
| | | kinase 2 | | | | | | |
| MmugDNA.27045.1.S1_at | HOMER1 | homer homolog 1 (Drosophila) | Mmu.16400 | XP_001108808 /// | 59.80412 | A | 82.8224 | P |
| | | | | XP_001108859 /// | | | | |
| | | | | XP_001108899 /// | | | | |
| | | | | XP_001108946 /// | | | | |
| | | | | XP_001109003 /// | | | | |
| | | | | XP_001109058 /// | | | | |
| | | | | XP_001109116 /// | | | | |
| | | | | XP_001109170 | | | | |
| MmuSTS.1348.1.S1_at | HOXB7 | homeobox B7 | Mmu.16913 | XP_001088822 | 134.1311 | A | 124.6616 | P |
| MmugDNA.18776.1.S1_at | HPD | 4-hydroxyphenylpyruvate | Mmu.14575 | XP_001096061 /// | 81.20009 | A | 312.6377 | P |
| | | dioxygenase | | XP_001096175 | | | | |
| Mmu.15730.2.S1_at | HSP90AB1 | heat shock 90 kDa protein 1, | Mmu.142 | XP_001098219 /// | 97.19216 | A | 432.5437 | P |
| | | beta | | XP_001098426 /// | | | | |
| | | | | XP_001098520 /// | | | | |
| | | | | XP_001098716 /// | | | | |
| | | | | XP_001098925 /// | | | | |
| | | | | XP_001099027 /// | | | | |
| | | | | XP_001099135 /// | | | | |
| | | | | XP_001099237 /// | | | | |
| | | | | XP_001099339 /// | | | | |
| | | | | XP_001099439 | | | | |
| MmugDNA.28970.1.S1_at | IL1RN | interleukin 1 receptor antagonist | Mmu.15827 | XP_001091493 /// | 126.3157 | A | 202.4636 | P |
| | | | | XP_001091717 /// | | | | |
| | | | | XP_001091833 | | | | |
| MmuSTS.681.1.S1_at | IL1RN | interleukin 1 receptor antagonist | Mmu.15827 | XP_001091493 /// | 108.0968 | A | 347.2209 | P |
| | | | | XP_001091717 /// | | | | |
| | | | | XP_001091833 | | | | |
| MmugDNA.7719.1.S1_at | IL4I1 | interleukin 4 induced 1 | Mmu.15390 | XP_001115731 /// | 122.4228 | A | 134.9988 | P |
| | | | | XP_001115739 /// | | | | |
| | | | | XP_001115750 /// | | | | |
| | | | | XP_001115759 /// | | | | |
| | | | | XP_001115764 /// | | | | |
| | | | | XP_001115773 | | | | |
| MmugDNA.21962.1.S1_at | INHBA | inhibin, beta A | — | XP_001098421 /// | 5.461364 | A | 66.77403 | P |
| | | | | XP_001098514 | | | | |
| MmugDNA.41698.1.S1_at | ITGA6 | Integrin, alpha 6 | Mmu.11085 | XP_001086200 | 175.6256 | A | 326.1319 | P |
| MmuSTS.4395.1.S1_at | ITGA9 | integrin, alpha 9 | — | XP_001086555 | 12.68558 | A | 106.7995 | P |
| MmugDNA.36020.1.S1_at | ITGB5 | integrin, beta 5 | Mmu.1239 | XP_001113831 /// | 118.9835 | A | 287.9891 | P |
| | | | | XP_001113881 /// | | | | |
| | | | | XP_001113909 | | | | |
| MmugDNA.33524.1.S1_at | JAG1 | jagged 1 | Mmu.16088 | XP_001116216 | 33.29051 | A | 158.451 | P |
| MmugDNA.25725.1.S1_at | KCNE1 | potassium voltage-gated | Mmu.14910 | XP_001088840 /// | 8.312235 | A | 125.2664 | P |
| | | channel, Isk-related family, | | XP_001088944 /// | | | | |
| | | member 1 | | XP_001089061 /// | | | | |
| | | | | XP_001089178 | | | | |
| MmugDNA.2200.1.S1_s_at | KCNJ13 | potassium inwardly-rectifying | Mmu.11590 | XP_001114522 /// | 80.08498 | A | 118.0615 | P |
| | | channel, subfamily J, member 13 | | XP_001114542 | | | | |
| Mmu.7460.6.S1_x_at | KIR3DH5 | killer-cell Ig-like receptor | Mmu.17415 | NP_001098643 | 251.4261 | A | 142.5331 | P |
| | | KIR3DH5 | | | | | | |
| Mmu.7460.12.S1_x_at | KIR3DL10 | killer immunoglobulin-like | Mmu.17259 | NP_001098640 | 1.215597 | A | 128.9819 | P |
| | | receptor KIR3DL10 | | | | | | |
| Mmu.9316.1.S1_at | KLF11 | Kruppel-like factor 11 | Mmu.11355 | XP_001090608 | 501.1391 | A | 598.1434 | P |
| MmugDNA.33624.1.S1_at | KLK15 | kallikrein-related peptidase 15 | Mmu.15386 | XP_001116155 /// | 58.26991 | A | 165.5999 | P |
| | | | | XP_001116159 /// | | | | |
| | | | | XP_001116169 /// | | | | |
| | | | | XP_001116177 /// | | | | |
| | | | | XP_001116190 /// | | | | |
| | | | | XP_001116199 /// | | | | |
| | | | | XP_001116226 /// | | | | |
| | | | | XP_001116235 | | | | |
| MmugDNA.40811.1.S1_at | KSR1 | kinase suppressor of ras | Mmu.2049 | XP_001105629 | 92.95608 | A | 89.93006 | P |
| MmuSTS.385.1.S1_at | LMO1 | LIM domain only 1 (rhombotin 1) | Mmu.14044 | XP_001105032 /// | 84.15849 | A | 209.9162 | P |
| | | | | XP_001105198 /// | | | | |
| | | | | XP_001105265 | | | | |
| MmuSTS.1666.1.S1_at | LNX1 | ligand of numb-protein X 1 | Mmu.16462 | XP_001090921 /// | 104.5588 | A | 155.7875 | P |
| | | | | XP_001091044 /// | | | | |
| | | | | XP_001091164 | | | | |
| Mmu.7390.1.S1_at | LOC574134 | VAMP-2 | Mmu.3489 | NP_001027992 | 220.164 | A | 376.094 | P |
| Mmu.1906.5.S1_s_at | LOC574146 | NKG2-A | Mmu.3577 | NP_001028001 | 12.69617 | A | 90.53711 | P |
| MmugDNA.15100.1.S1_at | LOC693289 | Similar to ATP-binding cassette, | Mmu.12529 | XP_001082244 /// | 7.136568 | A | 109.7202 | P |
| | | sub-family A member 8 | | XP_001082492 /// | | | | |
| | | | | XP_001082622 | | | | |
| MmuSTS.1757.1.S1_at | LOC693556 | similar to ras responsive element | Mmu.14828 | XP_001082265 /// | 109.3152 | A | 122.6399 | P |
| | | binding protein 1 isoform 1 | | XP_001082516 /// | | | | |
| | | | | XP_001082652 /// | | | | |
| | | | | XP_001082784 /// | | | | |
| | | | | XP_001082911 | | | | |
| MmugDNA.20287.1.S1_at | LOC693696 | similar to longevity assurance | Mmu.16301 | XP_001082530 /// | 9.598577 | A | 92.75128 | P |
| | | homolog 2 | | XP_001082667 /// | | | | |
| | | | | XP_001082802 | | | | |
| MmugDNA.12459.1.S1_at | LOC693821 | similar to THAP domain | Mmu.11226 | XP_001086766 | 33.44794 | A | 97.39143 | P |
| | | containing 7 | | | | | | |
| MmugDNA.17057.1.S1_at | LOC694043 | Similar to RECK protein | Mmu.12983 | XP_001083242 /// | 36.28584 | A | 106.7528 | P |
| | | precursor | | XP_001083599 | | | | |
| MmugDNA.14488.1.S1_at | LOC694192 | similar to Protein C18orf54 | Mmu.15470 | XP_001082497 /// | 158.6407 | A | 146.8237 | P |
| | | precursor | | XP_001082628 /// | | | | |
| | | | | XP_001082761 | | | | |
| MmugDNA.32899.1.S1_at | LOC694220 | similar to glutathione S- | Mmu.16453 | XP_001083156 /// | 151.0824 | A | 165.4515 | P |
| | | transferase, C-terminal domain | | XP_001083273 /// | | | | |
| | | containing isoform 1 | | XP_001083401 | | | | |
| MmugDNA.35637.1.S1_at | LOC694461 | similar to RIO kinase 1 isoform 1 | Mmu.13193 | XP_001084416 /// | 195.3009 | A | 347.8302 | P |
| | | | | XP_001084537 /// | | | | |
| | | | | XP_001084661 | | | | |
| MmugDNA.32349.1.S1_at | LOC694620 | similar to regulator of G-protein | Mmu.16259 | XP_001084439 /// | 49.87419 | A | 116.6921 | P |
| | | signalling 6 | | XP_001084557 /// | | | | |
| | | | | XP_001084681 | | | | |
| MmugDNA.31733.1.S1_at | LOC694857 | similar to Ca2+-dependent | Mmu.14856 | XP_001083727 /// | 89.40633 | A | 66.00955 | P |
| | | activator protein for secretion 2 | | XP_001083836 /// | | | | |
| | | isoform b | | XP_001083951 /// | | | | |
| | | | | XP_001084057 /// | | | | |
| | | | | XP_001084178 /// | | | | |
| | | | | XP_001084294 /// | | | | |
| | | | | XP_001084413 | | | | |
| MmugDNA.8053.1.S1_at | LOC694961 | Similar to Scm-like with four mbt | Mmu.13251 | XP_001084282 /// | 111.6069 | A | 98.00121 | P |
| | | domains 1 | | XP_001084404 /// | | | | |
| | | | | XP_001084525 /// | | | | |
| | | | | XP_001084648 /// | | | | |
| | | | | XP_001084766 /// | | | | |
| | | | | XP_001084884 /// | | | | |
| | | | | XP_001084999 | | | | |
| MmugDNA.7498.1.S1_at | LOC695519 | hypothetical protein LOC695519 | Mmu.14586 | XP_001088156 | 103.4704 | A | 190.2334 | P |
| MmugDNA.23700.1.S1_at | LOC695660 | similar to glutamate receptor 6 | Mmu.14770 | XP_001086511 /// | 71.56487 | A | 175.5264 | P |
| | | isoform 1 precursor | | XP_001086640 /// | | | | |
| | | | | XP_001086762 | | | | |
| Mmu.12414.1.S1_at | LOC695807 | similar to positive cofactor 2, | Mmu.12304 | XP_001084461 | 334.7846 | A | 548.711 | P |
| | | glutamine/Q-rich-associated | | | | | | |
| | | protein isoform b | | | | | | |
| MmugDNA.30964.1.S1_at | LOC695817 | similar to FRG1 protein (FSHD | Mmu.5349 | XP_001084469 | 63.37233 | A | 129.4325 | P |
| | /// | region gene 1 protein) /// similar | | | | | | |
| | LOC721908 | to FRG1 protein (FSHD region | | | | | | |
| | | gene 1 protein) | | | | | | |
| MmugDNA.40736.1.S1_at | LOC695861 | similar to regulatory factor X3 | Mmu.15656 | XP_001086023 /// | 59.62864 | A | 127.9034 | P |
| | | isoform b | | XP_001086140 /// | | | | |
| | | | | XP_001086369 /// | | | | |
| | | | | XP_001086480 /// | | | | |
| | | | | XP_001086606 /// | | | | |
| | | | | XP_001086729 | | | | |
| MmugDNA.17800.1.S1_at | LOC695993 | similar to chromosome 18 open | Mmu.11030 | XP_001084399 /// | 114.231 | A | 191.3399 | P |
| | | reading frame 25 isoform b | | XP_001084520 /// | | | | |
| | | | | XP_001084644 | | | | |
| MmugDNA.25624.1.S1_at | LOC696061 | similar to Wilms tumor 1 isoform B | Mmu.4826 | XP_001084704 | 7.96631 | A | 115.5726 | P |
| MmunewRS.241.1.S1_at | LOC696130 | similar to lin-28 homolog B | Mmu.2034 | XP_001086990 | 38.80841 | A | 120.6038 | P |
| MmugDNA.27370.1.S1_at | LOC696199 | hypothetical protein LOC696199 | Mmu.15122 | XP_001085896 /// | 53.2388 | A | 143.1268 | P |
| | | | | XP_001085999 /// | | | | |
| | | | | XP_001086115 /// | | | | |
| | | | | XP_001086220 | | | | |
| MmuSTS.2262.1.S1_at | LOC696202 | similar to cathepsin E isoform a | Mmu.11543 | XP_001089941 /// | 5.594962 | A | 126.9847 | P |
| | | preproprotein | | XP_001090059 /// | | | | |
| | | | | XP_001090171 /// | | | | |
| | | | | XP_001090284 | | | | |
| MmugDNA.9916.1.S1_at | LOC696275 | similar to neuregulin 1 isoform | Mmu.16225 | XP_001085266 /// | 109.3953 | A | 329.6868 | P |
| | | HRG-beta1 | | XP_001085962 /// | | | | |
| | | | | XP_001086071 /// | | | | |
| | | | | XP_001086184 | | | | |
| MmugDNA.2716.1.S1_at | LOC696683 | similar to origin recognition | Mmu.12240 | XP_001085300 | 18.94276 | A | 94.6161 | P |
| | | complex subunit 5 isoform 1 | | | | | | |
| MmuSTS.2097.1.S1_s_at | LOC696726 | similar to Apolipoprotein C-III | Mmu.3042 | XP_001090312 | 296.7122 | A | 776.4622 | P |
| | | precursor (Apo-CIII) (ApoC-III) | | | | | | |
| MmugDNA.20065.1.S1_at | LOC696749 | similar to runt-related | Mmu.14911 | XP_001086266 /// | 216.7346 | A | 510.84 | P |
| | | transcription factor 1 isoform a | | XP_001086504 /// | | | | |
| | | | | XP_001086631 /// | | | | |
| | | | | XP_001086755 /// | | | | |
| | | | | XP_001086875 /// | | | | |
| | | | | XP_001086981 /// | | | | |
| | | | | XP_001087104 /// | | | | |
| | | | | XP_001087224 /// | | | | |
| | | | | XP_001087338 | | | | |
| MmugDNA.40590.1.S1_at | LOC696991 | similar to CG13322-PA, isoform A | Mmu.15342 | XP_001090213 /// | 151.6879 | A | 116.2028 | P |
| | | | | XP_001090328 /// | | | | |
| | | | | XP_001090443 /// | | | | |
| | | | | XP_001090556 | | | | |
| MmugDNA.23596.1.S1_at | LOC697028 | similar to dedicator of | Mmu.4738 | XP_001085641 | 42.86666 | A | 102.283 | P |
| | | cytokinesis 7 | | | | | | |
| MmugDNA.19935.1.S1_at | LOC697140 | similar to LIM domain binding 3 | Mmu.11452 | XP_001084921 /// | 127.76 | A | 128.6186 | P |
| | | | | XP_001085158 /// | | | | |
| | | | | XP_001085274 | | | | |
| MmugDNA.19209.1.S1_s_at | LOC697208 | similar to Neutrophil gelatinase- | Mmu.11352 | XP_001083008 | 87.27077 | A | 281.2362 | P |
| | | associated lipocalin precursor | | | | | | |
| | | (NGAL) (p25) (25 kDa alpha-2- | | | | | | |
| | | microglobulin-related subunit of | | | | | | |
| | | MMP-9) (Lipocalin-2) (Oncogene | | | | | | |
| | | 24p3) | | | | | | |
| MmugDNA.25784.1.S1_at | LOC697300 | Similar to DNA topoisomerase I | Mmu.12250 | XP_001088021 | 107.8373 | A | 191.1222 | P |
| Mmu.12394.1.S1_at | LOC697308 | similar to CG2453-PA | Mmu.3029 | XP_001089249 | 220.9762 | A | 178.96 | P |
| MmugDNA.33930.1.S1_s_at | LOC697557 | similar to LIN-7 homolog A (LIN- | Mmu.14198 | XP_001087299 | 17.28876 | A | 53.62199 | P |
| | | 7A) (mLin-7) (Mammalian LIN- | | | | | | |
| | | seven protein 1) (MALS-1) | | | | | | |
| | | (Vertebrate LIN 7 homolog 1) | | | | | | |
| | | (Veli-1 protein) | | | | | | |
| MmugDNA.27371.1.S1_at | LOC697751 | hypothetical protein LOC697751 | Mmu.14664 | XP_001086421 /// | 39.36357 | A | 72.29453 | P |
| | | | | XP_001086529 /// | | | | |
| | | | | XP_001086660 /// | | | | |
| | | | | XP_001086783 /// | | | | |
| | | | | XP_001086904 | | | | |
| MmugDNA.41587.1.S1_at | LOC697948 | similar to Apical Junction | Mmu.15719 | XP_001094873 /// | 231.1788 | A | 167.211 | P |
| | | Molecule family member (ajm-1) | | XP_001094990 /// | | | | |
| | | | | XP_001095091 /// | | | | |
| | | | | XP_001095202 /// | | | | |
| | | | | XP_001095318 /// | | | | |
| | | | | XP_001095432 /// | | | | |
| | | | | XP_001095548 | | | | |
| MmugDNA.2651.1.S1_s_at | LOC698116 | hypothetical protein LOC698116 | Mmu.17317 | XP_001089195 | 2.093363 | A | 121.8847 | P |
| MmugDNA.34368.1.S1_at | LOC698257 | hypothetical protein LOC698257 | Mmu.14406 | XP_001091064 | 35.19047 | A | 156.6444 | P |
| MmugDNA.6912.1.S1_at | LOC698488 | similar to glycoprotein M6A | Mmu.309 | XP_001088513 /// | 55.25916 | A | 91.12907 | P |
| | | isoform 1 | | XP_001088626 /// | | | | |
| | | | | XP_001088729 /// | | | | |
| | | | | XP_001088856 /// | | | | |
| | | | | XP_001088960 /// | | | | |
| | | | | XP_001089075 /// | | | | |
| | | | | XP_001089193 /// | | | | |
| | | | | XP_001089301 /// | | | | |
| | | | | XP_001089420 /// | | | | |
| | | | | XP_001089530 /// | | | | |
| | | | | XP_001089652 | | | | |
| MmugDNA.8688.1.S1_s_at | LOC698576 | similar to plakophilin 4 isoform a | Mmu.90 | XP_001090763 /// | 57.58762 | A | 130.691 | P |
| | | | | XP_001091487 /// | | | | |
| | | | | XP_001091595 /// | | | | |
| | | | | XP_001091710 /// | | | | |
| | | | | XP_001091829 | | | | |
| MmugDNA.4919.1.S1_at | LOC698583 | similar to transcobalamin I | Mmu.3193 | XP_001088817 | 6.806493 | A | 121.0638 | P |
| | | precursor | | | | | | |
| MmugDNA.25652.1.S1_at | LOC698610 | similar to netrin-G1 ligand | Mmu.14852 | XP_001090221 /// | 159.8217 | A | 460.219 | P |
| | | | | XP_001090333 /// | | | | |
| | | | | XP_001090447 | | | | |
| MmugDNA.7880.1.S1_at | LOC698922 | similar to transcription | Mmu.1273 | XP_001087401 | 67.81429 | A | 120.6219 | P |
| | | elongation factor B (SIII), | | | | | | |
| | | polypeptide 1 | | | | | | |
| MmugDNA.37713.1.S1_s_at | LOC698993 | similar to RAD1 homolog isoform 1 | Mmu.16416 | XP_001090119 /// | 10.74294 | A | 78.33199 | P |
| | | | | XP_001090232 /// | | | | |
| | | | | XP_001090346 | | | | |
| MmugDNA.26991.1.S1_x_at | LOC699049 | similar to SMT3 suppressor of | Mmu.10807 | XP_001082298 /// | 132.9624 | A | 151.3819 | P |
| | /// | mif two 3 homolog 2 /// similar | | XP_001093875 /// | | | | |
| | LOC705512 | to SMT3 suppressor of mif two 3 | | XP_001101180 | | | | |
| | /// | homolog 2 isoform b precursor | | | | | | |
| | LOC712242 | /// similar to SMT3 suppressor of | | | | | | |
| | /// SUMO2 | mif two 3 homolog 2 /// SMT3 | | | | | | |
| | | suppressor of mif two 3 homolog | | | | | | |
| | | 2 (S. cerevisiae) | | | | | | |
| MmugDNA.30038.1.S1_at | LOC699233 | similar to J domain protein | Mmu.14908 | XP_001091149 /// | 20.38795 | A | 105.1611 | P |
| | | C21orf55 | | XP_001091275 /// | | | | |
| | | | | XP_001091400 | | | | |
| MmugDNA.24540.1.S1_at | LOC699255 | similar to c-Mpl binding protein | Mmu.8566 | XP_001103235 | 97.93331 | A | 108.0194 | P |
| | /// | isoform c /// similar to c-Mpl | | | | | | |
| | LOC713773 | binding protein isoform a | | | | | | |
| MmugDNA.36570.1.S1_at | LOC699320 | similar to keratin 1 | Mmu.15995 | XP_001097706 /// | 82.466 | A | 155.1366 | P |
| | | | | XP_001097800 /// | | | | |
| | | | | XP_001097902 /// | | | | |
| | | | | XP_001097988 /// | | | | |
| | | | | XP_001098082 /// | | | | |
| | | | | XP_001098182 /// | | | | |
| | | | | XP_001098292 | | | | |
| MmugDNA.36148.1.S1_at | LOC699519 | similar to cytochrome P450, | Mmu.16164 | XP_001091192 /// | 6.762844 | A | 128.3562 | P |
| | | family 26, subfamily A, | | XP_001091311 /// | | | | |
| | | polypeptide 1 isoform 2 | | XP_001091435 | | | | |
| MmugDNA.34762.1.S1_at | LOC699606 | similar to YKT6 v-SNARE protein | Mmu.14457 | XP_001092458 /// | 352.2617 | A | 455.7151 | P |
| | | | | XP_001092567 | | | | |
| MmugDNA.5021.1.S1_at | LOC699884 | similar to aspartate beta- | Mmu.12462 | XP_001090473 /// | 74.45432 | A | 142.7363 | P |
| | | hydroxylase isoform b | | XP_001090590 /// | | | | |
| | | | | XP_001090710 /// | | | | |
| | | | | XP_001090824 | | | | |
| MmugDNA.35909.1.S1_at | LOC700246 | hypothetical protein LOC700246 | Mmu.16339 | XP_001091537 /// | 141.387 | A | 153.2613 | P |
| | | | | XP_001091653 /// | | | | |
| | | | | XP_001091770 | | | | |
| MmugDNA.2916.1.S1_at | LOC700561 | similar to Protein FAM61B | Mmu.4706 | XP_001090063 | 64.34468 | A | 237.9115 | P |
| MmugDNA.2141.1.S1_at | LOC700632 | similar to tumor protein p53 | Mmu.12749 | XP_001090474 /// | 103.4481 | A | 245.4697 | P |
| | | inducible nuclear protein 1 | | XP_001090592 | | | | |
| MmugDNA.6969.1.S1_s_at | LOC700634 | similar to PTK2 protein tyrosine | Mmu.3254 | XP_001091188 /// | 318.6551 | A | 503.8765 | P |
| | | kinase 2 isoform a | | XP_001092257 /// | | | | |
| | | | | XP_001092479 /// | | | | |
| | | | | XP_001092599 /// | | | | |
| | | | | XP_001092714 /// | | | | |
| | | | | XP_001092835 /// | | | | |
| | | | | XP_001092947 /// | | | | |
| | | | | XP_001093060 /// | | | | |
| | | | | XP_001093166 /// | | | | |
| | | | | XP_001093282 | | | | |
| MmugDNA.11282.1.S1_at | LOC700766 | similar to CG14299-PA, isoform A | Mmu.13220 | XP_001089105 | 102.762 | A | 180.8994 | P |
| MmugDNA.1940.1.S1_at | LOC700803 | LOC57821 | Mmu.10545 | XP_001093899 /// | 42.41242 | A | 65.8287 | P |
| | | | | XP_001094005 /// | | | | |
| | | | | XP_001094116 | | | | |
| MmugDNA.22818.1.S1_at | LOC700803 | LOC57821 | Mmu.10545 | XP_001093899 /// | 99.11937 | A | 161.2611 | P |
| | | | | XP_001094005 /// | | | | |
| | | | | XP_001094116 | | | | |
| MmugDNA.33647.1.S1_s_at | LOC700961 | similar to zinc finger protein 79 | Mmu.15647 | XP_001095865 | 124.1566 | A | 166.1214 | P |
| | | (pT7) | | | | | | |
| MmugDNA.43384.1.S1_at | LOC700988 | similar to androgen-induced 1 | Mmu.4494 | XP_001091992 /// | 50.12266 | A | 91.1585 | P |
| | | | | XP_001092111 /// | | | | |
| | | | | XP_001092349 /// | | | | |
| | | | | XP_001092577 | | | | |
| MmugDNA.13490.1.S1_at | LOC701093 | similar to calcitonin receptor | Mmu.14864 | XP_001099231 /// | 70.82004 | A | 141.6998 | P |
| | | | | XP_001099337 /// | | | | |
| | | | | XP_001099435 /// | | | | |
| | | | | XP_001099544 | | | | |
| MmuSTS.1092.1.S1_at | LOC701162 | similar to solute carrier family 6, | Mmu.11269 | XP_001099500 | 62.05202 | A | 183.6655 | P |
| | | member 17 | | | | | | |
| MmugDNA.10860.1.S1_s_at | LOC701186 | similar to serine | Mmu.12203 | XP_001096193 /// | 299.3282 | A | 568.1307 | P |
| | | hydroxymethyltransferase 1 | | XP_001096314 /// | | | | |
| | | (soluble) isoform 1 | | XP_001096436 /// | | | | |
| | | | | XP_001096547 /// | | | | |
| | | | | XP_001096653 /// | | | | |
| | | | | XP_001096755 /// | | | | |
| | | | | XP_001096871 /// | | | | |
| | | | | XP_001096982 | | | | |
| MmugDNA.9882.1.S1_at | LOC701376 | similar to NADPH oxidase 1 | Mmu.15254 | XP_001089791 /// | 59.80977 | A | 157.23 | P |
| | | isoform long variant | | XP_001089905 /// | | | | |
| | | | | XP_001090025 /// | | | | |
| | | | | XP_001090252 /// | | | | |
| | | | | XP_001090373 | | | | |
| MmugDNA.24847.1.S1_at | LOC701547 | similar to glycine-N- | Mmu.14222 | XP_001092072 /// | 104.8917 | A | 213.7509 | P |
| | | acyltransferase-like 1 | | XP_001092197 /// | | | | |
| | | | | XP_001092316 /// | | | | |
| | | | | XP_001092427 | | | | |
| Mmu.11429.1.A1_at | LOC701690 | Similar to T-cell activation Rho | Mmu.12230 | XP_001095239 /// | 125.3303 | A | 137.3554 | P |
| | | GTPase-activating protein | | XP_001095349 /// | | | | |
| | | isoform b | | XP_001095467 /// | | | | |
| | | | | XP_001095579 /// | | | | |
| | | | | XP_001095675 /// | | | | |
| | | | | XP_001095775 | | | | |
| MmugDNA.37160.1.S1_at | LOC701721 | Similar to X Kell blood group | Mmu.13648 | XP_001090721 | 93.54068 | A | 282.5066 | P |
| | | precursor-related, X-linked | | | | | | |
| MmugDNA.14409.1.S1_at | LOC701722 | similar to nucleoporin 62 | Mmu.12987 | XP_001094695 | 17.99913 | A | 83.21231 | P |
| Mmu.2615.1.S1_at | LOC702282 | similar to ADP-ribosylation factor 7 | Mmu.3100 | XP_001096998 | 45.92997 | A | 137.102 | P |
| MmugDNA.12356.1.S1_at | LOC702392 | similar to peroxin1 | Mmu.13262 | XP_001100851 /// | 267.6477 | A | 272.199 | P |
| | | | | XP_001101055 | | | | |
| MmugDNA.35938.1.S1_at | LOC702474 | similar to F46E10.1a /// similar | Mmu.11756 | XP_001093983 /// | 212.2583 | A | 374.0013 | P |
| | /// | to radical S-adenosyl methionine | | XP_001097818 | | | | |
| | LOC705626 | domain containing 1 | | | | | | |
| MmugDNA.22044.1.S1_at | LOC702523 | similar to plexin domain | Mmu.13851 | XP_001094684 /// | 56.80964 | A | 144.3693 | P |
| | | containing 2 precursor | | XP_001094803 | | | | |
| MmugDNA.30120.1.S1_at | LOC702596 | similar to nucleolar RNA- | Mmu.15669 | XP_001099108 /// | 517.206 | A | 624.0098 | P |
| | | associated protein alpha isoform | | XP_001099208 | | | | |
| MmugDNA.14645.1.S1_at | LOC702627 | similar to CNKSR family member 3 | Mmu.16800 | XP_001095122 | 112.3272 | A | 171.7359 | P |
| MmuSTS.4277.1.S1_at | LOC702809 | similar to eukaryotic translation | Mmu.7828 | XP_001096741 /// | 46.99945 | A | 91.84947 | P |
| | /// | elongation factor 1 alpha 2 /// | | XP_001107881 /// | | | | |
| | LOC703715 | similar to eukaryotic translation | | XP_001107938 /// | | | | |
| | /// | elongation factor 1 alpha 2 /// | | XP_001107997 /// | | | | |
| | LOC704199 | similar to eukaryotic translation | | XP_001108047 | | | | |
| | /// | elongation factor 1 alpha 2 /// | | | | | | |
| | LOC704438 | similar to eukaryotic translation | | | | | | |
| | /// | elongation factor 1 alpha 1 /// | | | | | | |
| | LOC709017 | similar to eukaryotic translation | | | | | | |
| | /// | elongation factor 1 alpha 1 /// | | | | | | |
| | LOC715351 | similar to eukaryotic translation | | | | | | |
| | | elongation factor 1 alpha 1 | | | | | | |
| Mmu.14402.2.A1_at | LOC702904 | Similar to T-cell receptor beta | Mmu.3323 | XP_001091216 | 43.79837 | A | 185.5729 | P |
| | | chain C region | | | | | | |
| MmugDNA.35794.1.S1_at | LOC703305 | similar to adrenomedullin | Mmu.1495 | XP_001100373 /// | 84.27942 | A | 185.7086 | P |
| | | | | XP_001100748 /// | | | | |
| | | | | XP_001100827 | | | | |
| MmugDNA.18234.1.S1_s_at | LOC703331 | similar to runt-related | Mmu.14787 | XP_001100592 /// | 58.99397 | A | 193.9611 | P |
| | | transcription factor 2 isoform b | | XP_001100682 /// | | | | |
| | | | | XP_001100772 /// | | | | |
| | | | | XP_001100855 /// | | | | |
| | | | | XP_001100961 /// | | | | |
| | | | | XP_001101058 | | | | |
| MmugDNA.42623.1.S1_at | LOC703350 | Similar to SLD5 | Mmu.12445 | XP_001094432 | 116.1626 | A | 230.3927 | P |
| MmugDNA.37293.1.S1_at | LOC703448 | similar to NHS-like 1 | Mmu.12755 | XP_001094901 /// | 38.42938 | A | 120.9677 | P |
| | | | | XP_001095017 /// | | | | |
| | | | | XP_001095123 | | | | |
| MmugDNA.28192.1.S1_at | LOC703449 | similar to solute carrier family 22 | Mmu.14760 | XP_001098823 /// | 85.29906 | A | 109.4904 | P |
| | | member 1 isoform a | | XP_001098927 /// | | | | |
| | | | | XP_001099030 | | | | |
| Mmu.9793.1.S1_at | LOC703475 | similar to chloride intracellular | Mmu.13655 | XP_001098953 /// | 113.1555 | A | 216.6789 | P |
| | | channel 2 | | XP_001099055 /// | | | | |
| | | | | XP_001099159 | | | | |
| MmugDNA.14145.1.S1_s_at | LOC703676 | similar to clusterin associated | Mmu.12076 | XP_001095007 | 9.514027 | A | 72.95879 | P |
| | | protein 1 isoform 1 | | | | | | |
| MmugDNA.32118.1.S1_at | LOC703699 | similar to N-acylsphingosine | Mmu.1534 | XP_001098236 /// | 49.51334 | A | 133.2948 | P |
| | | amidohydrolase (acid | | XP_001098342 | | | | |
| | | ceramidase) 1 preproprotein | | | | | | |
| | | isoform a | | | | | | |
| MmugDNA.5848.1.S1_at | LOC703707 | similar to type IV alpha 6 | Mmu.14512 | XP_001098247 /// | 118.7948 | A | 173.2802 | P |
| | | collagen isoform A precursor | | XP_001098348 /// | | | | |
| | | | | XP_001098448 | | | | |
| MmugDNA.6896.1.S1_at | LOC703747 | hypothetical protein LOC703747 | Mmu.11245 | XP_001097797 /// | 99.1186 | A | 166.5303 | P |
| | | | | XP_001097899 /// | | | | |
| | | | | XP_001097986 /// | | | | |
| | | | | XP_001098078 /// | | | | |
| | | | | XP_001098178 /// | | | | |
| | | | | XP_001098384 | | | | |
| MmugDNA.18415.1.S1_at | LOC703912 | similar to zinc-finger protein | Mmu.16177 | XP_001095490 /// | 66.7701 | A | 171.3356 | P |
| | | NOLZ1 | | XP_001095599 /// | | | | |
| | | | | XP_001095696 /// | | | | |
| | | | | XP_001095797 | | | | |
| MmugDNA.20879.1.S1_at | LOC703981 | similar to NOD9 protein isoform 1 | Mmu.15714 | XP_001104018 /// | 68.5675 | A | 247.2942 | P |
| | | | | XP_001104187 /// | | | | |
| | | | | XP_001104271 /// | | | | |
| | | | | XP_001104348 /// | | | | |
| | | | | XP_001104430 | | | | |
| MmugDNA.43058.1.S1_at | LOC704126 | similar to kinesin family member | Mmu.14823 | XP_001096456 /// | 240.8623 | A | 391.0729 | P |
| | | 13A | | XP_001096670 /// | | | | |
| | | | | XP_001096780 /// | | | | |
| | | | | XP_001096896 | | | | |
| MmugDNA.9461.1.S1_at | LOC704129 | similar to M-phase | Mmu.872 | XP_001097629 /// | 9.741516 | A | 150.9924 | P |
| | /// | phosphoprotein 6 /// similar to | | XP_001111939 | | | | |
| | LOC714335 | M-phase phosphoprotein 6 | | | | | | |
| MmugDNA.36952.1.S1_at | LOC704226 | similar to | Mmu.1901 | XP_001095099 /// | 181.1201 | A | 255.0666 | P |
| | | metallophosphoesterase 1 | | XP_001095213 /// | | | | |
| | | precursor | | XP_001095328 /// | | | | |
| | | | | XP_001095440 /// | | | | |
| | | | | XP_001095557 /// | | | | |
| | | | | XP_001095654 | | | | |
| MmugDNA.20355.1.S1_at | LOC704563 | hypothetical protein LOC704563 | Mmu.14834 | XP_001087946 /// | 43.39126 | A | 163.4751 | P |
| | | | | XP_001088073 /// | | | | |
| | | | | XP_001088182 /// | | | | |
| | | | | XP_001088296 /// | | | | |
| | | | | XP_001088391 | | | | |
| MmugDNA.32338.1.S1_at | LOC704620 | Hypothetical protein LOC704620 | Mmu.12860 | XP_001092983 | 484.9445 | A | 1003.579 | P |
| MmugDNA.26222.1.S1_at | LOC704779 | hypothetical protein LOC704779 | Mmu.1356 | XP_001088505 /// | 145.6491 | A | 229.6519 | P |
| | | | | XP_001088616 /// | | | | |
| | | | | XP_001088722 /// | | | | |
| | | | | XP_001088845 | | | | |
| MmugDNA.32288.1.S1_at | LOC705099 | similar to IBR domain containing 2 | Mmu.13564 | XP_001097834 | 169.2173 | A | 287.2967 | P |
| MmuSTS.753.1.S1_at | LOC705192 | similar to solute carrier family 34 | Mmu.4 | XP_001087672 /// | 399.9195 | A | 614.1758 | P |
| | | (sodium phosphate), member 3 | | XP_001087793 | | | | |
| MmugDNA.13807.1.S1_at | LOC705221 | similar to CD2-associated protein | Mmu.14706 | XP_001103871 | 101.1595 | A | 165.9324 | P |
| MmugDNA.32676.1.S1_at | LOC705267 | similar to mitochondrial | Mmu.4582 | XP_001093640 | 81.411 | A | 106.6216 | P |
| | | ribosomal protein S5 | | | | | | |
| MmugDNA.39707.1.S1_at | LOC705275 | similar to 5-azacytidine induced 2 | Mmu.2888 | XP_001093647 | 228.3279 | A | 445.0563 | P |
| MmugDNA.3813.1.S1_at | LOC705358 | similar to PDZ and LIM domain 5 | Mmu.11535 | XP_001102789 /// | 196.3453 | A | 217.9732 | P |
| | | isoform a | | XP_001103137 /// | | | | |
| | | | | XP_001103292 /// | | | | |
| | | | | XP_001103360 /// | | | | |
| | | | | XP_001103447 | | | | |
| MmugDNA.41256.1.S1_at | LOC705369 | similar to SET domain containing 3 | Mmu.12527 | XP_001103146 /// | 307.612 | A | 442.7356 | P |
| | | | | XP_001103224 /// | | | | |
| | | | | XP_001103370 | | | | |
| MmugDNA.28135.1.S1_at | LOC705773 | similar to wingless-type MMTV | Mmu.15115 | XP_001107735 /// | 53.23829 | A | 147.2127 | P |
| | | integration site family, member | | XP_001107795 /// | | | | |
| | | 2B isoform WNT-2B2 | | XP_001107861 | | | | |
| MmugDNA.32069.1.S1_at | LOC705781 | similar to CG10721-PA | Mmu.11312 | XP_001098386 | 139.6408 | A | 181.3665 | P |
| MmugDNA.7008.1.S1_at | LOC705781 | similar to CG10721-PA | Mmu.11312 | XP_001098386 | 257.4816 | A | 205.8675 | P |
| MmugDNA.20418.1.S1_at | LOC705794 | similar to Glutamate receptor 4 | Mmu.15725 | XP_001100749 /// | 49.4125 | A | 144.5466 | P |
| | | precursor (GluR-4) (GluR4) | | XP_001100828 /// | | | | |
| | | (GluR-D) (Glutamate receptor | | XP_001100934 /// | | | | |
| | | ionotropic, AMPA 4) (AMPA- | | XP_001101031 /// | | | | |
| | | selective glutamate receptor 4) | | XP_001101120 /// | | | | |
| | | | | XP_001101205 /// | | | | |
| | | | | XP_001101297 /// | | | | |
| | | | | XP_001101389 | | | | |
| MmugDNA.11389.1.S1_at | LOC705913 | similar to cytidine deaminase | Mmu.14713 | XP_001096632 | 157.2027 | A | 432.5854 | P |
| Mmu.8604.1.A1_at | LOC706093 | Similar to golgi-associated | Mmu.12976 | XP_001099454 /// | 105.2247 | A | 270.9851 | P |
| | | microtubule-binding protein | | XP_001099564 | | | | |
| | | HOOK3 | | | | | | |
| MmugDNA.31582.1.S1_at | LOC706263 | similar to potassium voltage- | Mmu.15899 | XP_001108426 | 64.51572 | A | 142.2389 | P |
| | | gated channel, Isk-related | | | | | | |
| | | family, member 4 | | | | | | |
| MmugDNA.6257.1.S1_at | LOC706392 | similar to Temporarily Assigned | Mmu.15492 | XP_001100027 /// | 28.65171 | A | 216.6125 | P |
| | | Gene name family member (tag- | | XP_001100112 /// | | | | |
| | | 241) | | XP_001100204 | | | | |
| MmugDNA.2951.1.S1_at | LOC706404 | similar to anillin, actin binding | Mmu.12004 | XP_001103129 /// | 41.87038 | A | 150.5943 | P |
| | | protein (scraps homolog, | | XP_001103356 /// | | | | |
| | | Drosophila) | | XP_001103440 | | | | |
| MmugDNA.16996.1.S1_at | LOC706417 | similar to rap2 interacting | Mmu.3060 | XP_001105219 /// | 77.67221 | A | 127.3368 | P |
| | | protein x isoform 2 | | XP_001105432 /// | | | | |
| | | | | XP_001105503 /// | | | | |
| | | | | XP_001105576 | | | | |
| MmugDNA.2760.1.S1_at | LOC706531 | similar to SRY (sex determining | Mmu.2172 | XP_001098923 | 494.1494 | A | 320.2222 | P |
| | | region Y)-box 4 | | | | | | |
| MmugDNA.41505.1.S1_at | LOC706541 | similar to PDZ domain-containing | Mmu.12847 | XP_001100504 /// | 60.10989 | A | 85.12571 | P |
| | | guanine nucleotide exchange | | XP_001100780 /// | | | | |
| | | factor I | | XP_001100863 /// | | | | |
| | | | | XP_001100970 /// | | | | |
| | | | | XP_001101236 /// | | | | |
| | | | | XP_001101336 /// | | | | |
| | | | | XP_001101427 /// | | | | |
| | | | | XP_001101518 | | | | |
| MmugDNA.4165.1.S1_at | LOC707050 | similar to caldesmon 1 isoform 4 | Mmu.1286 | XP_001103048 /// | 134.2276 | A | 113.0357 | P |
| | | | | XP_001103209 /// | | | | |
| | | | | XP_001103288 /// | | | | |
| | | | | XP_001103525 /// | | | | |
| | | | | XP_001103606 /// | | | | |
| | | | | XP_001103692 /// | | | | |
| | | | | XP_001103781 /// | | | | |
| | | | | XP_001103868 /// | | | | |
| | | | | XP_001103951 /// | | | | |
| | | | | XP_001104042 /// | | | | |
| | | | | XP_001104129 /// | | | | |
| | | | | XP_001104210 /// | | | | |
| | | | | XP_001104289 /// | | | | |
| | | | | XP_001104371 | | | | |
| MmugDNA.24929.1.S1_at | LOC707355 | similar to zinc finger protein 672 | Mmu.15300 | XP_001105495 /// | 160.5896 | A | 148.2761 | P |
| | | | | XP_001105637 /// | | | | |
| | | | | XP_001105777 | | | | |
| MmugDNA.21203.1.S1_x_at | LOC707383 | similar to amyloid beta (A4) | Mmu.669 | XP_001101993 | 428.4578 | A | 499.8212 | P |
| | | precursor protein-binding, family | | | | | | |
| | | B, member 1 interacting protein | | | | | | |
| MmugDNA.35674.1.S1_at | LOC707661 | similar to additional sex combs | Mmu.15484 | XP_001101400 /// | 110.2575 | A | 154.3551 | P |
| | | like 1 | | XP_001101495 /// | | | | |
| | | | | XP_001101584 /// | | | | |
| | | | | XP_001101677 | | | | |
| MmugDNA.14411.1.S1_at | LOC707686 | similar to angiogenic factor | Mmu.12022 | XP_001106588 /// | 312.2592 | A | 474.9281 | P |
| | | VG5Q | | XP_001106645 /// | | | | |
| | | | | XP_001106704 /// | | | | |
| | | | | XP_001106767 | | | | |
| MmuSTS.1472.1.S1_at | LOC707739 | Similar to serine/threonine | Mmu.12485 | XP_001096161 | 31.29481 | A | 81.42928 | P |
| | | protein kinase MASK | | | | | | |
| MmugDNA.6011.1.S1_at | LOC707982 | similar to rhomboid domain | Mmu.15898 | XP_001110015 /// | 253.2026 | A | 423.9781 | P |
| | /// | containing 1 /// hypothetical | | XP_001110070 /// | | | | |
| | LOC708189 | protein LOC708189 | | XP_001110119 /// | | | | |
| | | | | XP_001110165 /// | | | | |
| | | | | XP_001110210 | | | | |
| MmugDNA.37057.1.S1_at | LOC708094 | similar to mannosyl (alpha-1,3-)- | Mmu.15839 | XP_001102758 /// | 104.4101 | A | 147.5036 | P |
| | | glycoprotein beta-1,4-N- | | XP_001102852 | | | | |
| | | acetylglucosaminyltransferase, | | | | | | |
| | | isoenzyme A | | | | | | |
| MmugDNA.42069.1.S1_s_at | LOC708427 | similar to organic solute | Mmu.11865 | XP_001108335 | 78.81197 | A | 116.7262 | P |
| | | transporter beta | | | | | | |
| MmugDNA.30697.1.S1_at | LOC708649 | similar to leucine rich repeat | Mmu.13704 | XP_001101795 /// | 163.4347 | A | 221.4591 | P |
| | | containing 28 | | XP_001101886 /// | | | | |
| | | | | XP_001101987 /// | | | | |
| | | | | XP_001102074 | | | | |
| MmuSTS.1715.1.S1_at | LOC708906 | similar to wingless-type MMTV | Mmu.14255 | XP_001104947 /// | 130.317 | A | 218.3881 | P |
| | | integration site family, member | | XP_001105026 /// | | | | |
| | | 10B precursor | | XP_001105115 | | | | |
| MmuSTS.4837.1.S1_at | LOC708940 | similar to Guanine nucleotide- | Mmu.14862 | XP_001108555 /// | 67.89697 | A | 63.73149 | P |
| | | binding protein G(i), alpha-1 | | XP_001108609 /// | | | | |
| | | subunit (Adenylate cyclase- | | XP_001108656 | | | | |
| | | inhibiting G alpha protein) | | | | | | |
| MmuSTS.508.1.S1_at | LOC709049 | similar to activating signal | Mmu.14734 | XP_001105587 /// | 145.0563 | A | 167.4562 | P |
| | | cointegrator 1 complex subunit 1 | | XP_001105655 /// | | | | |
| | | | | XP_001105727 /// | | | | |
| | | | | XP_001105789 /// | | | | |
| | | | | XP_001105856 /// | | | | |
| | | | | XP_001105929 /// | | | | |
| | | | | XP_001106003 | | | | |
| MmugDNA.31920.1.S1_at | LOC709087 | similar to EF-hand domain (C- | Mmu.14530 | XP_001097580 | 36.69831 | A | 95.83981 | P |
| | | terminal) containing 2 | | | | | | |
| MmugDNA.32637.1.S1_at | LOC709253 | similar to nucleosomal binding | Mmu.13802 | XP_001103630 | 80.94846 | A | 106.7455 | P |
| | | protein 1 | | | | | | |
| MmugDNA.42508.1.S1_at | LOC709303 | similar to ATP binding protein | Mmu.1839 | XP_001104184 /// | 60.61469 | A | 122.8885 | P |
| | | associated with cell | | XP_001104266 | | | | |
| | | differentiation | | | | | | |
| MmugDNA.38015.1.S1_at | LOC709468 | similar to terminal | Mmu.12395 | XP_001107131 | 75.45173 | A | 118.2112 | P |
| | | deoxynucleotidyltransferase | | | | | | |
| | | interacting factor 1 | | | | | | |
| Mmu.10346.1.S1_at | LOC709544 | hypothetical protein LOC709544 | Mmu.16556 | XP_001096738 | 507.0977 | A | 619.4869 | P |
| Mmu.6678.1.S1_x_at | LOC709619 | similar to Metallothionein-1I | Mmu.11575 | XP_001098159 | 1740.248 | A | 2628.085 | P |
| | | (MT-1I) (Metallothionein-II) | | | | | | |
| MmugDNA.8461.1.S1_at | LOC709735 | similar to nuclear receptor | Mmu.15049 | XP_001110159 /// | 42.78323 | A | 100.8168 | P |
| | | subfamily 5, group A, member 2 | | XP_001110202 /// | | | | |
| | | isoform 2 | | XP_001110281 | | | | |
| MmugDNA.39938.1.S1_at | LOC709882 | similar to Troponin T, cardiac | Mmu.14101 | XP_001098451 | 129.6782 | A | 230.9345 | P |
| | | muscle (TnTc) (Cardiac muscle | | | | | | |
| | | troponin T) (cTnT) | | | | | | |
| MmugDNA.1217.1.S1_at | LOC709920 | similar to Helix-loop-helix protein | Mmu.15111 | XP_001112029 /// | 8.452376 | A | 99.66127 | P |
| | | 2 (HEN2) (Nescient helix loop | | XP_001112063 /// | | | | |
| | | helix 2) (NSCL-2) | | XP_001112098 | | | | |
| MmugDNA.19461.1.S1_at | LOC710132 | similar to p53 target zinc finger | Mmu.13485 | XP_001109218 | 348.8743 | A | 339.8408 | P |
| | | protein isoform 1 | | | | | | |
| MmugDNA.33092.1.S1_s_at | LOC710136 | similar to alpha-2-glycoprotein 1, | Mmu.2996 | XP_001098813 | 12.33912 | A | 216.8815 | P |
| | | zinc | | | | | | |
| MmugDNA.41451.1.S1_at | LOC710209 | similar to F33H2.6 | Mmu.12671 | XP_001108744 /// | 21.07946 | A | 115.8894 | P |
| | | | | XP_001108792 /// | | | | |
| | | | | XP_001108841 /// | | | | |
| | | | | XP_001108885 /// | | | | |
| | | | | XP_001108926 /// | | | | |
| | | | | XP_001108981 /// | | | | |
| | | | | XP_001109038 /// | | | | |
| | | | | XP_001109094 /// | | | | |
| | | | | XP_001109206 | | | | |
| MmugDNA.25032.1.S1_at | LOC710300 | similar to CDC14 homolog B | Mmu.15640 | XP_001106305 /// | 96.10104 | A | 163.648 | P |
| | | isoform 1 | | XP_001106374 /// | | | | |
| | | | | XP_001106436 | | | | |
| MmugDNA.26478.1.S1_at | LOC710518 | similar to mitochondrial solute | Mmu.11000 | XP_001105927 /// | 455.317 | A | 775.371 | P |
| | | carrier-like protein | | XP_001106001 /// | | | | |
| | | | | XP_001106076 /// | | | | |
| | | | | XP_001106141 /// | | | | |
| | | | | XP_001106211 | | | | |
| MmugDNA.17545.1.S1_at | LOC710681 | hypothetical protein LOC710681 | Mmu.16264 | XP_001106907 /// | 117.03 | A | 219.1418 | P |
| | | | | XP_001106971 /// | | | | |
| | | | | XP_001107040 | | | | |
| MmugDNA.28666.1.S1_at | LOC710731 | similar to palmdelphin | Mmu.12773 | XP_001105606 /// | 37.84584 | A | 84.9398 | P |
| | | | | XP_001105677 /// | | | | |
| | | | | XP_001105748 /// | | | | |
| | | | | XP_001105804 /// | | | | |
| | | | | XP_001105954 | | | | |
| MmugDNA.8258.1.S1_at | LOC710987 | similar to mucolipin 3 | Mmu.15135 | XP_001108095 /// | 29.74118 | A | 102.5425 | P |
| | | | | XP_001108302 /// | | | | |
| | | | | XP_001108412 | | | | |
| MmugDNA.34412.1.S1_at | LOC711115 | similar to mitogen-activated | Mmu.3822 | XP_001108716 /// | 22.68439 | A | 99.87075 | P |
| | | protein kinase 8 isoform 1 | | XP_001108770 /// | | | | |
| | | | | XP_001108815 /// | | | | |
| | | | | XP_001108865 | | | | |
| Mmu.5150.1.A1_at | LOC711124 | Similar to NCK-associated | Mmu.2403 | XP_001099879 | 88.93265 | A | 141.7522 | P |
| | | protein 1 isoform 2 | | | | | | |
| Mmu.5996.2.S1_x_at | LOC711141 | hypothetical protein LOC711141 | Mmu.10434 | XP_001099892 | 92.06384 | A | 109.7883 | P |
| MmugDNA.17269.1.S1_at | LOC711164 | similar to sulfite oxidase | Mmu.15990 | XP_001113374 /// | 171.6959 | A | 271.7326 | P |
| | | | | XP_001113406 /// | | | | |
| | | | | XP_001113430 /// | | | | |
| | | | | XP_001113456 | | | | |
| MmugDNA.4283.1.S1_at | LOC711279 | similar to leucine zipper, putative | Mmu.16155 | XP_001109524 /// | 156.9818 | A | 163.6825 | P |
| | | tumor suppressor 2 | | XP_001109574 /// | | | | |
| | | | | XP_001109628 /// | | | | |
| | | | | XP_001109674 /// | | | | |
| | | | | XP_001109715 /// | | | | |
| | | | | XP_001109770 /// | | | | |
| | | | | XP_001109817 | | | | |
| MmugDNA.33876.1.S1_s_at | LOC711336 | similar to olfactomedin 2 | Mmu.15445 | XP_001099531 /// | 105.1338 | A | 182.7413 | P |
| | | | | XP_001099628 /// | | | | |
| | | | | XP_001099726 /// | | | | |
| | | | | XP_001099831 | | | | |
| MmugDNA.17217.1.S1_at | LOC711485 | similar to acyl-Coenzyme A | Mmu.12959 | XP_001109931 | 123.1174 | A | 293.2802 | P |
| | | dehydrogenase, long chain | | | | | | |
| | | precursor | | | | | | |
| MmugDNA.15166.1.S1_at | LOC711633 | similar to zinc finger CCCH-type | Mmu.15988 | XP_001114089 /// | 185.2786 | A | 239.9244 | P |
| | | containing 10 | | XP_001114107 /// | | | | |
| | | | | XP_001114132 /// | | | | |
| | | | | XP_001114150 | | | | |
| MmuSTS.4200.1.S1_at | LOC711691 | Similar to pre-B-cell leukemia | Mmu.4832 | XP_001100529 | 105.6631 | A | 780.6314 | P |
| | | transcription factor 3 | | | | | | |
| Mmu.13564.1.S1_at | LOC711742 | similar to kinesin family member | Mmu.564 | XP_001113416 /// | 8.346619 | A | 230.6845 | P |
| | | 9 isoform 2 | | XP_001113441 | | | | |
| MmugDNA.22716.1.S1_at | LOC711901 | similar to TBC1 domain family, | Mmu.11462 | XP_001109803 /// | 130.5118 | A | 170.4844 | P |
| | | member 16 | | XP_001109846 /// | | | | |
| | | | | XP_001109890 | | | | |
| MmugDNA.43479.1.S1_at | LOC711908 | similar to transmembrane 4 | Mmu.2535 | XP_001108758 /// | 8.667226 | A | 84.54928 | P |
| | | superfamily member 1 | | XP_001108803 | | | | |
| MmugDNA.30723.1.S1_at | LOC711984 | Similar to zinc finger CCCH-type | Mmu.12594 | XP_001106124 /// | 175.1743 | A | 424.0466 | P |
| | | domain containing 7 | | XP_001106316 /// | | | | |
| | | | | XP_001106384 /// | | | | |
| | | | | XP_001106446 | | | | |
| MmugDNA.20892.1.S1_at | LOC712033 | similar to PCTAIRE protein | Mmu.14735 | XP_001100911 | 120.9395 | A | 256.8878 | P |
| | | kinase 1 | | | | | | |
| MmugDNA.15919.1.S1_at | LOC712047 | similar to V-set and | Mmu.11490 | XP_001109973 /// | 73.78225 | A | 138.8611 | P |
| | | immunoglobulin domain | | XP_001110168 | | | | |
| | | containing 2 | | | | | | |
| MmugDNA.10446.1.S1_at | LOC712115 | similar to ADP-ribosylation factor | Mmu.14062 | XP_001101005 | 75.08247 | A | 115.4225 | P |
| | | guanine nucleotide factor 6 | | | | | | |
| | | isoform a | | | | | | |
| MmugDNA.11597.1.S1_at | LOC712144 | similar to zinc finger protein 42 | Mmu.15367 | XP_001099728 /// | 138.5558 | A | 151.442 | P |
| | | isoform 2 | | XP_001099833 | | | | |
| MmugDNA.12728.1.S1_at | LOC712272 | similar to fibronectin type 3 and | Mmu.13034 | XP_001109699 | 37.6952 | A | 102.4023 | P |
| | | SPRY domain-containing protein | | | | | | |
| MmuSTS.849.1.S1_at | LOC712288 | similar to thrombospondin, type | Mmu.11407 | XP_001106832 /// | 58.88806 | A | 99.43536 | P |
| | | I, domain containing 2 | | XP_001106900 | | | | |
| MmugDNA.26929.1.S1_s_at | LOC712486 | similar to ficolin 2 isoform a | Mmu.11973 | XP_001098197 /// | 37.70898 | A | 184.9997 | P |
| | | precursor | | XP_001098304 | | | | |
| MmugDNA.1324.1.S1_s_at | LOC712600 | similar to quaking homolog, KH | Mmu.2689 | XP_001101642 | 109.0662 | A | 139.7951 | P |
| | | domain RNA binding isoform | | | | | | |
| | | HQK-5 | | | | | | |
| MmugDNA.22601.1.S1_at | LOC713029 | hypothetical protein LOC713029 | Mmu.14564 | XP_001110409 | 11.16738 | A | 138.9437 | P |
| MmugDNA.12133.1.S1_at | LOC713035 | similar to BCL2-like 1 isoform 1 | Mmu.16103 | XP_001109879 /// | 159.8234 | A | 150.4057 | P |
| | | | | XP_001109926 /// | | | | |
| | | | | XP_001109964 /// | | | | |
| | | | | XP_001110009 /// | | | | |
| | | | | XP_001110062 /// | | | | |
| | | | | XP_001110113 /// | | | | |
| | | | | XP_001110162 /// | | | | |
| | | | | XP_001110205 /// | | | | |
| | | | | XP_001110245 /// | | | | |
| | | | | XP_001110285 /// | | | | |
| | | | | XP_001110326 | | | | |
| MmugDNA.158.1.S1_at | LOC713216 | similar to minor | Mmu.719 | XP_001110535 /// | 235.1732 | A | 562.5519 | P |
| | | histocompatibility antigen 13 | | XP_001110638 /// | | | | |
| | | isoform 3 | | XP_001110677 | | | | |
| MmugDNA.21170.1.S1_at | LOC713289 | similar to sarcosine | Mmu.14226 | XP_001099822 /// | 50.93322 | A | 157.4154 | P |
| | | dehydrogenase | | XP_001100018 /// | | | | |
| | | | | XP_001100105 | | | | |
| MmugDNA.17300.1.S1_s_at | LOC713324 | similar to erythrocyte membrane | Mmu.14133 | XP_001102639 | 68.31221 | A | 90.16785 | P |
| | | protein band 4.1 like 4B isoform 2 | | | | | | |
| MmuSTS.2766.1.S1_at | LOC713353 | Similar to unactive progesterone | Mmu.4022 | XP_001115328 /// | 77.942 | A | 233.5481 | P |
| | | receptor, 23 kD | | XP_001115356 /// | | | | |
| | | | | XP_001115374 /// | | | | |
| | | | | XP_001115388 | | | | |
| MmugDNA.2816.1.S1_s_at | LOC713680 | similar to Protein C9orf7 | Mmu.11422 | XP_001100751 /// | 178.9342 | A | 450.418 | P |
| | | | | XP_001100830 | | | | |
| MmugDNA.32391.1.S1_at | LOC713786 | similar to hepatocellular | Mmu.14691 | XP_001103245 | 155.9434 | A | 269.8064 | P |
| | | carcinoma-associated antigen | | | | | | |
| | | 112 | | | | | | |
| MmugDNA.37205.1.S1_at | LOC713800 | similar to plexin A2 | Mmu.15066 | XP_001110877 /// | 40.86835 | A | 95.29446 | P |
| | | | | XP_001110951 /// | | | | |
| | | | | XP_001110980 | | | | |
| MmugDNA.33340.1.S1_at | LOC713882 | similar to smooth muscle myosin | Mmu.14493 | XP_001109108 /// | 7.818644 | A | 114.8105 | P |
| | | heavy chain 11 isoform SM1A | | XP_001109220 /// | | | | |
| | | | | XP_001109323 /// | | | | |
| | | | | XP_001109374 /// | | | | |
| | | | | XP_001109425 /// | | | | |
| | | | | XP_001109463 | | | | |
| MmuSTS.3126.1.S1_at | LOC713917 | similar to neuronal guanine | Mmu.4419 | XP_001114604 | 89.85418 | A | 191.6622 | P |
| | | nucleotide exchange factor | | | | | | |
| MmuSTS.1097.1.S1_at | LOC714170 | similar to progestin and adipoQ | Mmu.11914 | XP_001111860 | 62.66206 | A | 124.0636 | P |
| | | receptor family member IX | | | | | | |
| MmugDNA.26038.1.S1_at | LOC714370 | Similar to decay accelerating | Mmu.1237 | XP_001111953 /// | 10.7786 | A | 155.9851 | P |
| | | factor for complement | | XP_001111994 /// | | | | |
| | | | | XP_001112031 /// | | | | |
| | | | | XP_001112064 /// | | | | |
| | | | | XP_001112134 /// | | | | |
| | | | | XP_001112168 /// | | | | |
| | | | | XP_001112209 /// | | | | |
| | | | | XP_001112247 /// | | | | |
| | | | | XP_001112287 /// | | | | |
| | | | | XP_001112321 | | | | |
| MmugDNA.18856.1.S1_at | LOC714749 | similar to Rsb-66 protein | Mmu.15699 | XP_001104349 /// | 73.02561 | A | 90.52779 | P |
| | | | | XP_001104431 /// | | | | |
| | | | | XP_001104509 /// | | | | |
| | | | | XP_001104586 | | | | |
| MmugDNA.30186.1.S1_at | LOC714958 | similar to Protein C19orf15 | Mmu.15418 | XP_001106958 /// | 63.63976 | A | 198.4253 | P |
| | | precursor | | XP_001107205 /// | | | | |
| | | | | XP_001107270 | | | | |
| MmugDNA.41904.1.S1_at | LOC715138 | similar to transmembrane | Mmu.11792 | XP_001107212 /// | 20.71842 | A | 109.4672 | P |
| | | protease, serine 2 | | XP_001107275 | | | | |
| MmugDNA.43404.1.S1_at | LOC715295 | similar to p53-induced protein | — | XP_001105448 | 182.3128 | A | 279.0873 | P |
| MmugDNA.13984.1.S1_at | LOC715330 | Similar to beta-site APP-cleaving | Mmu.1613 | XP_001107950 /// | 31.46918 | A | 188.1045 | P |
| | | enzyme 2 isoform C | | XP_001108061 | | | | |
| | | preproprotein | | | | | | |
| MmugDNA.23412.1.S1_x_at | LOC715553 | similar to Protein PP2447 | Mmu.16050 | XP_001111734 /// | 651.9257 | A | 749.3463 | P |
| | | | | XP_001111774 /// | | | | |
| | | | | XP_001111813 /// | | | | |
| | | | | XP_001111850 /// | | | | |
| | | | | XP_001111878 /// | | | | |
| | | | | XP_001111918 /// | | | | |
| | | | | XP_001111956 | | | | |
| MmuSTS.563.1.S1_at | LOC715706 | Similar to schlafen family | Mmu.11333 | XP_001114176 /// | 47.03052 | A | 86.69991 | P |
| | | member 13 | | XP_001114192 /// | | | | |
| | | | | XP_001114211 | | | | |
| MmugDNA.23724.1.S1_at | LOC715752 | similar to zinc finger protein 44 | Mmu.13185 | XP_001107149 /// | 177.6898 | A | 141.1652 | P |
| | | | | XP_001107204 /// | | | | |
| | | | | XP_001107269 | | | | |
| MmugDNA.30744.1.S1_s_at | LOC715853 | similar to interphase | Mmu.13940 | XP_001113603 | 221.8494 | A | 178.2616 | P |
| | | cyctoplasmic foci protein 45 | | | | | | |
| MmugDNA.11990.1.S1_at | LOC716153 | similar to myelin gene | Mmu.13074 | XP_001106720 | 32.29033 | A | 95.01642 | P |
| | | expression factor 2 | | | | | | |
| MmugDNA.36922.1.S1_at | LOC716153 | similar to myelin gene | Mmu.13074 | XP_001106720 | 71.02611 | A | 102.504 | P |
| | | expression factor 2 | | | | | | |
| MmugDNA.40257.1.S1_at | LOC716245 | similar to sphingosine-1- | Mmu.4100 | XP_001106861 | 122.3767 | A | 123.3001 | P |
| | | phosphate lyase 1 | | | | | | |
| MmugDNA.36455.1.S1_at | LOC716351 | similar to SEC22 vesicle | Mmu.14967 | XP_001115262 /// | 162.7943 | A | 119.6179 | P |
| | | trafficking protein homolog C | | XP_001115277 /// | | | | |
| | | isoform b | | XP_001115291 /// | | | | |
| | | | | XP_001115333 /// | | | | |
| | | | | XP_001115349 /// | | | | |
| | | | | XP_001115363 /// | | | | |
| | | | | XP_001115380 | | | | |
| MmuSTS.2718.1.S1_at | LOC716439 | similar to filamin A interacting | Mmu.12823 | XP_001113081 /// | 20.86039 | A | 142.4841 | P |
| | | protein 1 | | XP_001113105 /// | | | | |
| | | | | XP_001113142 /// | | | | |
| | | | | XP_001113175 | | | | |
| MmugDNA.18150.1.S1_at | LOC716504 | similar to Cdc42 effector protein 2 | — | XP_001113902 /// | 45.00316 | A | 317.3692 | P |
| | | | | XP_001113931 | | | | |
| MmugDNA.10063.1.S1_at | LOC716601 | similar to UPF3 regulator of | Mmu.13132 | XP_001107426 | 35.87898 | A | 178.3976 | P |
| | | nonsense transcripts homolog A | | | | | | |
| | | isoform hUpf3p | | | | | | |
| MmugDNA.2703.1.S1_at | LOC716903 | hypothetical protein LOC716903 | Mmu.15043 | XP_001115326 /// | 21.5953 | A | 134.5116 | P |
| | | | | XP_001115372 /// | | | | |
| | | | | XP_001115386 /// | | | | |
| | | | | XP_001115400 | | | | |
| Mmu.8945.1.S1_at | LOC717346 | similar to complement factor H | Mmu.4677 | XP_001111499 /// | 90.61079 | A | 197.2676 | P |
| | | isoform a precursor | | XP_001111535 /// | | | | |
| | | | | XP_001111875 | | | | |
| MmugDNA.17230.1.S1_at | LOC717350 | similar to ets homologous factor | Mmu.15764 | XP_001115436 /// | 66.78262 | A | 86.82366 | P |
| | | | | XP_001115449 /// | | | | |
| | | | | XP_001115455 /// | | | | |
| | | | | XP_001115469 /// | | | | |
| | | | | XP_001115487 /// | | | | |
| | | | | XP_001115502 /// | | | | |
| | | | | XP_001115517 | | | | |
| MmugDNA.20406.1.S1_at | LOC717474 | similar to GLE1-like, RNA export | Mmu.12903 | XP_001110762 /// | 182.8572 | A | 225.2607 | P |
| | | mediator isoform 1 | | XP_001110844 | | | | |
| MmugDNA.22554.1.S1_s_at | LOC717764 | similar to phospholipase C, beta | Mmu.11823 | XP_001115104 | 294.9439 | A | 463.7735 | P |
| | | 3 (phosphatidylinositol-specific) | | | | | | |
| MmugDNA.41138.1.S1_at | LOC717824 | similar to mago-nashi homolog | Mmu.2413 | XP_001115401 /// | 56.18679 | A | 182.9515 | P |
| | | | | XP_001115410 | | | | |
| MmugDNA.478.1.S1_at | LOC718703 | similar to TEA domain family | Mmu.15394 | XP_001114796 /// | 18.20921 | A | 131.8721 | P |
| | | member 2 | | XP_001114808 /// | | | | |
| | | | | XP_001114818 /// | | | | |
| | | | | XP_001114832 | | | | |
| MmugDNA.40598.1.S1_at | LOC719284 | similar to Duffy blood group | Mmu.10996 | XP_001117188 /// | 79.40461 | A | 157.7951 | P |
| | | | | XP_001117194 /// | | | | |
| | | | | XP_001117200 | | | | |
| MmugDNA.8485.1.S1_at | LOC719645 | similar to H326 | Mmu.153 | XP_001117421 /// | 55.48396 | A | 132.2252 | P |
| | | | | XP_001117432 /// | | | | |
| | | | | XP_001117435 /// | | | | |
| | | | | XP_001117439 /// | | | | |
| | | | | XP_001117441 /// | | | | |
| | | | | XP_001117445 /// | | | | |
| | | | | XP_001117452 /// | | | | |
| | | | | XP_001117454 /// | | | | |
| | | | | XP_001117459 /// | | | | |
| | | | | XP_001117461 /// | | | | |
| | | | | XP_001117464 /// | | | | |
| | | | | XP_001117465 /// | | | | |
| | | | | XP_001117470 /// | | | | |
| | | | | XP_001117473 | | | | |
| MmuSTS.2495.1.S1_at | LOC719814 | similar to zinc finger protein 577 | Mmu.15382 | XP_001116472 /// | 105.0435 | A | 133.1272 | P |
| | | | | XP_001116485 /// | | | | |
| | | | | XP_001116492 | | | | |
| MmugDNA.11286.1.S1_at | LOC720186 | similar to immunoglobulin | Mmu.11138 | XP_001115307 | 385.697 | A | 457.8605 | P |
| | | superfamily, member 8 | | | | | | |
| MmugDNA.1499.1.S1_at | LOC721262 | similar to Pigment epithelium- | Mmu.12605 | XP_001117361 | 90.36726 | A | 288.4651 | P |
| | | derived factor precursor (PEDF) | | | | | | |
| | | (EPC-1) | | | | | | |
| MmunewRS.138.1.S1_at | LOC721825 | similar to cAMP responsive | Mmu.11710 | XP_001118020 | 87.49419 | A | 146.52 | P |
| | | element binding protein 3-like 3 | | | | | | |
| MmugDNA.39283.1.S1_at | LOC721914 | similar to olfactory receptor, | Mmu.13643 | XP_001118110 | 76.79032 | A | 189.9431 | P |
| | | family 2, subfamily A, member 7 | | | | | | |
| Mmu.15041.1.S1_at | MAOA | monoamine oxidase A | Mmu.3283 | XP_001096840 | 63.99507 | A | 84.97249 | P |
| MmugDNA.21143.1.S1_at | MAOA | monoamine oxidase A | Mmu.3283 | XP_001096840 | 127.6487 | A | 588.567 | P |
| MmugDNA.25736.1.S1_at | MDGA2 | MAM domain containing | Mmu.16277 | XP_001097241 /// | 18.25484 | A | 68.81326 | P |
| | | glycosylphosphatidylinositol | | XP_001097344 /// | | | | |
| | | anchor 2 | | XP_001097446 /// | | | | |
| | | | | XP_001097544 /// | | | | |
| | | | | XP_001097646 | | | | |
| MmugDNA.32119.1.S1_at | ME1 | malic enzyme 1, NADP(+)- | Mmu.11722 | XP_001084298 /// | 8.007969 | A | 80.68948 | P |
| | | dependent, cytosolic | | XP_001084419 /// | | | | |
| | | | | XP_001084539 /// | | | | |
| | | | | XP_001084663 /// | | | | |
| | | | | XP_001084781 /// | | | | |
| | | | | XP_001084901 | | | | |
| MmugDNA.20648.1.S1_at | MFAP3 | microfibrillar-associated protein 3 | Mmu.1139 | XP_001102567 | 209.1429 | A | 166.2625 | P |
| MmugDNA.27696.1.S1_at | MMP26 | matrix metallopeptidase 26 | Mmu.3669 | XP_001112141 | 53.29844 | A | 76.93641 | P |
| MmugDNA.22230.1.S1_s_at | MMP28 | matrix metallopeptidase 28 | Mmu.3666 | XP_001114445 | 123.8551 | A | 161.2347 | P |
| MmugDNA.15929.1.S1_at | MRAS | muscle RAS oncogene homolog | Mmu.14559 | XP_001114261 /// | 44.73249 | A | 123.0301 | P |
| | | | | XP_001114274 /// | | | | |
| | | | | XP_001114299 /// | | | | |
| | | | | XP_001114317 | | | | |
| MmuSTS.4170.1.S1_at | MRAS | muscle RAS oncogene homolog | Mmu.14559 | XP_001114261 /// | 150.9189 | A | 182.644 | P |
| | | | | XP_001114274 /// | | | | |
| | | | | XP_001114299 /// | | | | |
| | | | | XP_001114317 | | | | |
| Mmu.14436.1.S1_at | MRC1 | mannose receptor, C type 1 | Mmu.1302 | XP_001091661 /// | 42.83043 | A | 113.4529 | P |
| | | | | XP_001091901 | | | | |
| MmugDNA.31263.1.S1_at | MRGPRX4 | MAS-related GPR, member X4 | Mmu.9516 | NP_001035708 /// | 18.23305 | A | 173.069 | P |
| | | | | XP_001086954 | | | | |
| MmugDNA.13215.1.S1_at | MYO5B | myosin VB | Mmu.15475 | XP_001090434 /// | 76.57364 | A | 138.2834 | P |
| | | | | XP_001090545 /// | | | | |
| | | | | XP_001090668 | | | | |
| MmugDNA.42474.1.S1_at | NCAM1 | neural cell adhesion molecule 1 | Mmu.11207 | XP_001082236 /// | 145.3389 | A | 147.3262 | P |
| | | | | XP_001082361 /// | | | | |
| | | | | XP_001083241 /// | | | | |
| | | | | XP_001083366 /// | | | | |
| | | | | XP_001083486 /// | | | | |
| | | | | XP_001083597 /// | | | | |
| | | | | XP_001083697 /// | | | | |
| | | | | XP_001083809 /// | | | | |
| | | | | XP_001083924 | | | | |
| MmugDNA.3439.1.S1_at | NEB | nebulin | Mmu.10774 | XP_001084585 | 4.838272 | A | 107.4847 | P |
| MmugDNA.10723.1.S1_at | NECAP2 | NECAP endocytosis associated 2 | Mmu.3233 | XP_001086937 /// | 142.5812 | A | 201.7808 | P |
| | | | | XP_001087060 | | | | |
| Mmu.6763.1.S1_at | NEU1 | sialidase 1 (lysosomal sialidase) | Mmu.1002 | XP_001113418 /// | 414.9135 | A | 679.2563 | P |
| | | | | XP_001113467 /// | | | | |
| | | | | XP_001113496 | | | | |
| MmugDNA.26632.1.S1_at | NMNAT3 | nicotinamide nucleotide | Mmu.14941 | XP_001113328 /// | 100.2686 | A | 285.6383 | P |
| | | adenylyltransferase 3 | | XP_001113354 /// | | | | |
| | | | | XP_001113387 /// | | | | |
| | | | | XP_001113417 /// | | | | |
| | | | | XP_001113442 | | | | |
| MmugDNA.28543.1.S1_at | NR4A2 | Nuclear receptor subfamily 4, | Mmu.11507 | XP_001085438 /// | 67.00845 | A | 110.9794 | P |
| | | group A, member 2 | | XP_001085797 /// | | | | |
| | | | | XP_001085905 /// | | | | |
| | | | | XP_001086011 /// | | | | |
| | | | | XP_001086128 /// | | | | |
| | | | | XP_001086234 /// | | | | |
| | | | | XP_001086356 /// | | | | |
| | | | | XP_001086593 /// | | | | |
| | | | | XP_001086719 | | | | |
| MmugDNA.38502.1.S1_at | NRXN1 | neurexin 1 | Mmu.4429 | XP_001114208 | 18.97834 | A | 126.3031 | P |
| MmuSTS.4647.1.S1_at | NTNG2 | netrin G2 | Mmu.15124 | XP_001082464 /// | 3.059485 | A | 101.9615 | P |
| | | | | XP_001082588 /// | | | | |
| | | | | XP_001082730 /// | | | | |
| | | | | XP_001082854 | | | | |
| Mmu.2344.1.S1_at | NXPH4 | neurexophilin 4 | Mmu.3606 | XP_001099977 | 143.7606 | A | 166.9342 | P |
| Mmu.14635.1.S1_s_at | P11 | placental protein 11 | Mmu.1192 | XP_001097398 /// | 3.029125 | A | 102.4633 | P |
| | | | | XP_001097492 /// | | | | |
| | | | | XP_001097588 /// | | | | |
| | | | | XP_001097705 /// | | | | |
| | | | | XP_001097799 | | | | |
| MmuSTS.1070.1.S1_at | PAH | phenylalanine hydroxylase | Mmu.11888 | XP_001094859 | 24.82761 | A | 66.58179 | P |
| MmugDNA.3732.1.S1_at | PCGF2 | polycomb group ring finger 2 | Mmu.17122 | XP_001083603 /// | 7.621283 | A | 94.5854 | P |
| | | | | XP_001083705 /// | | | | |
| | | | | XP_001083817 | | | | |
| MmugDNA.30313.1.S1_at | PFKFB1 | 6-phosphofructo-2- | Mmu.15267 | XP_001091669 /// | 76.07756 | A | 92.32727 | P |
| | | kinase/fructose-2,6- | | XP_001091781 /// | | | | |
| | | biphosphatase 1 | | XP_001091907 | | | | |
| MmuSTS.2247.1.S1_at | PLG | plasminogen | Mmu.3024 | NP_001036540 /// | 48.69508 | A | 71.0714 | P |
| | | | | XP_001099441 | | | | |
| MmugDNA.5295.1.S1_s_at | PNLIPRP2 | pancreatic lipase-related protein 2 | Mmu.3256 | XP_001095293 | 9.050271 | A | 134.0069 | P |
| MmugDNA.15066.1.S1_at | PPM1F | protein phosphatase 1F | Mmu.13045 | XP_001089477 | 112.9894 | A | 349.5799 | P |
| MmugDNA.21620.1.S1_at | PPP5C | protein phosphatase 5, catalytic | Mmu.11271 | XP_001111636 /// | 604.6081 | A | 644.2534 | P |
| | | subunit | | XP_001111674 /// | | | | |
| | | | | XP_001111714 /// | | | | |
| | | | | XP_001111749 | | | | |
| MmugDNA.39032.1.S1_at | PRDX6 | Peroxiredoxin 6 | Mmu.4290 | XP_001101473 | 34.28012 | A | 142.5283 | P |
| MmugDNA.31823.1.S1_at | PRKACB | protein kinase, cAMP-dependent, | Mmu.1940 | XP_001105459 /// | 145.2954 | A | 122.2689 | P |
| | | catalytic, beta | | XP_001105534 /// | | | | |
| | | | | XP_001105605 /// | | | | |
| | | | | XP_001105676 /// | | | | |
| | | | | XP_001105747 /// | | | | |
| | | | | XP_001105803 /// | | | | |
| | | | | XP_001105875 /// | | | | |
| | | | | XP_001105953 /// | | | | |
| | | | | XP_001106026 /// | | | | |
| | | | | XP_001106097 /// | | | | |
| | | | | XP_001106164 | | | | |
| MmugDNA.36754.1.S1_at | PRR3 | proline rich 3 | Mmu.12623 | XP_001100535 | 92.55525 | A | 104.1183 | P |
| Mmu.12.1.S1_at | RASSF8 | Ras association (RalGDS/AF-6) | Mmu.13028 | XP_001102028 /// | 31.62563 | A | 82.27078 | P |
| | | domain family (N-terminal) | | XP_001102115 /// | | | | |
| | | member 8 | | XP_001102201 | | | | |
| MmuSTS.2090.1.S1_at | RBM11 | RNA binding motif protein 11 | Mmu.12892 | XP_001083260 | 81.05433 | A | 85.9953 | P |
| MmugDNA.7677.1.S1_at | RBM34 | RNA binding motif protein 34 | Mmu.12653 | XP_001102020 /// | 139.6196 | A | 60.82475 | P |
| | | | | XP_001102111 | | | | |
| MmugDNA.17401.1.S1_at | SEC24A | SEC24 family, member A (S. cerevisiae) | Mmu.13387 | XP_001109569 /// | 32.50195 | A | 160.1317 | P |
| | | | | XP_001109620 | | | | |
| MmugDNA.18877.1.S1_at | SF3B14 | similar to splicing factor 3B, 14 kDa | Mmu.942 | XP_001098393 | 96.04313 | A | 144.1895 | P |
| | | subunit | | | | | | |
| MmuSTS.3315.1.S1_at | SH3GLB2 | SH3-domain GRB2-like | Mmu.17131 | XP_001109262 | 415.9608 | A | 360.3215 | P |
| | | endophilin B2 | | | | | | |
| MmugDNA.28147.1.S1_at | SLC13A2 | solute carrier family 13 (sodium- | Mmu.11776 | XP_001106342 | 83.45712 | A | 172.6272 | P |
| | | dependent dicarboxylate | | | | | | |
| | | transporter), member 2 | | | | | | |
| MmugDNA.20608.1.S1_at | SLC25A11 | Solute carrier family 25 | Mmu.11522 | XP_001097307 /// | 159.8107 | A | 199.7657 | P |
| | | (mitochondrial carrier; | | XP_001097413 /// | | | | |
| | | oxoglutarate carrier), member | | XP_001097514 | | | | |
| | | 11 | | | | | | |
| MmugDNA.34347.1.S1_s_at | SLC25A13 | solute carrier family 25, member | Mmu.11416 | XP_001088340 | 83.63106 | A | 130.7075 | P |
| | | 13 (citrin) | | | | | | |
| MmugDNA.43541.1.S1_at | SLC25A17 | Solute carrier family 25 | Mmu.4154 | XP_001102293 | 135.3007 | A | 217.9323 | P |
| | | (mitochondrial carrier; | | | | | | |
| | | peroxisomal membrane protein, | | | | | | |
| | | 34 kDa), member 17 | | | | | | |
| MmugDNA.26126.1.S1_at | SOX2 | SRY (sex determining region Y)- | Mmu.10959 | NP_001136412 /// | 25.83881 | A | 100.8555 | P |
| | | box 2 | | XP_001106891 | | | | |
| MmuAffx.1.1.S1_at | SRY | sex determining region Y | Mmu.3544 | NP_001028008 | 56.02947 | A | 91.99885 | P |
| MmugDNA.15062.1.S1_at | SSBP1 | Single-stranded DNA binding | Mmu.4481 | XP_001084058 /// | 129.9467 | A | 146.7887 | P |
| | | protein 1 | | XP_001084179 /// | | | | |
| | | | | XP_001084295 /// | | | | |
| | | | | XP_001084414 /// | | | | |
| | | | | XP_001084536 | | | | |
| MmugDNA.17880.1.S1_at | ST3GAL1 | ST3 beta-galactoside alpha-2,3- | Mmu.12091 | XP_001088980 /// | 127.049 | A | 295.4928 | P |
| | | sialyltransferase 1 | | XP_001089209 /// | | | | |
| | | | | XP_001089316 /// | | | | |
| | | | | XP_001089439 /// | | | | |
| | | | | XP_001089550 | | | | |
| MmugDNA.26812.1.S1_at | ST8SIA4 | ST8 alpha-N-acetyl-neuraminide | Mmu.13440 | XP_001097339 | 135.5056 | A | 84.99597 | P |
| | | alpha-2,8-sialyltransferase 4 | | | | | | |
| MmugDNA.27466.1.S1_at | TAF11 | similar to Transcription initiation | Mmu.9248 | — | 94.84025 | A | 93.78352 | P |
| | | factor TFIID subunit 11 | | | | | | |
| | | (Transcription initiation factor | | | | | | |
| | | TFIID 28 kDa subunit) | | | | | | |
| | | (TAF(II)28) (TAFII-28) | | | | | | |
| | | (TAFII28) (TFIID subunit p30- | | | | | | |
| | | beta) | | | | | | |
| MmugDNA.17390.1.S1_at | TAR1 | trace amine receptor 1 | Mmu.16488 | NP_001074234 /// | 43.22684 | A | 83.6374 | P |
| | | | | XP_001102243 | | | | |
| MmugDNA.27658.1.S1_at | TCEA2 | transcription elongation factor A | Mmu.229 | XP_001082344 /// | 73.96481 | A | 92.49038 | P |
| | | (SII), 2 | | XP_001082860 /// | | | | |
| | | | | XP_001082986 /// | | | | |
| | | | | XP_001083100 /// | | | | |
| | | | | XP_001083220 /// | | | | |
| | | | | XP_001083344 | | | | |
| MmugDNA.8481.1.S1_at | TES | Testis derived transcript (3 LIM | Mmu.4028 | XP_001095286 | 52.37125 | A | 122.8702 | P |
| | | domains) | | | | | | |
| MmugDNA.9561.1.S1_at | TIMP-2 | tissue inhibitor of matrix | Mmu.1702 | XP_001106657 | 369.0166 | A | 888.6364 | P |
| | | metalloproteinase-2 | | | | | | |
| MmugDNA.502.1.S1_at | TIRAP | toll-interleukin 1 receptor (TIR) | Mmu.17493 | NP_001123907 /// | 205.38 | A | 386.3123 | P |
| | | domain containing adaptor | | XP_001112918 /// | | | | |
| | | protein | | XP_001112950 | | | | |
| MmugDNA.31314.1.S1_at | TMLHE | trimethyllysine hydroxylase, | Mmu.15229 | XP_001099467 /// | 183.9673 | A | 362.3624 | P |
| | | epsilon | | XP_001099575 /// | | | | |
| | | | | XP_001099674 | | | | |
| MmugDNA.86.1.S1_at | TRHDE | thyrotropin-releasing hormone | Mmu.130 | XP_001109391 | 53.7547 | A | 144.0242 | P |
| | | degrading enzyme | | | | | | |
| MmugDNA.13477.1.S1_at | TSHR | thyroid stimulating hormone | Mmu.3677 | XP_001104765 /// | 3.757645 | A | 64.06719 | P |
| | | receptor | | XP_001104839 | | | | |
| Mmu.5321.1.S1_at | TTC12 | tetratricopeptide repeat domain | Mmu.13011 | XP_001084384 /// | 108.8476 | A | 237.5948 | P |
| | | 12 | | XP_001084508 /// | | | | |
| | | | | XP_001084630 /// | | | | |
| | | | | XP_001084748 /// | | | | |
| | | | | XP_001084868 /// | | | | |
| | | | | XP_001084979 | | | | |
| MmugDNA.39789.1.S1_at | TTC7A | tetratricopeptide repeat domain | Mmu.15863 | XP_001113285 /// | 151.4908 | A | 248.7907 | P |
| | | 7A | | XP_001113315 /// | | | | |
| | | | | XP_001113346 | | | | |
| MmugDNA.33980.1.S1_at | TTLL4 | tubulin tyrosine ligase-like | Mmu.15909 | XP_001094019 /// | 273.2361 | A | 328.0809 | P |
| | | family, member 4 | | XP_001094615 /// | | | | |
| | | | | XP_001094742 /// | | | | |
| | | | | XP_001094864 | | | | |
| MmugDNA.29140.1.S1_s_at | UGCGL1 | UDP-glucose ceramide | Mmu.12163 | XP_001091001 /// | 404.7524 | A | 510.9632 | P |
| | | glucosyltransferase-like 1 | | XP_001091120 /// | | | | |
| | | | | XP_001091250 /// | | | | |
| | | | | XP_001091373 /// | | | | |
| | | | | XP_001091494 | | | | |
| MmugDNA.13424.1.S1_at | USP21 | Ubiquitin specific peptidase 21 | Mmu.11289 | XP_001117752 /// | 43.01239 | A | 94.55185 | P |
| | | | | XP_001117766 /// | | | | |
| | | | | XP_001117768 /// | | | | |
| | | | | XP_001117772 /// | | | | |
| | | | | XP_001117777 /// | | | | |
| | | | | XP_001117779 /// | | | | |
| | | | | XP_001117782 /// | | | | |
| | | | | XP_001117786 | | | | |
| MmugDNA.20532.1.S1_at | WDR77 | WD repeat domain 77 | Mmu.4390 | XP_001105103 | 179.0304 | A | 536.4213 | P |
| MmugDNA.33665.1.S1_at | WDR8 | WD repeat domain 8 | Mmu.15190 | XP_001083578 /// | 178.8616 | A | 306.8982 | P |
| | | | | XP_001083787 /// | | | | |
| | | | | XP_001083904 /// | | | | |
| | | | | XP_001084011 | | | | |
| MmugDNA.26867.1.S1_at | XG | Xg blood group | Mmu.11499 | XP_001086077 /// | 29.58194 | A | 136.8591 | P |
| | | | | XP_001086193 | | | | |
| MmugDNA.19387.1.S1_at | ZDHHC3 | zinc finger, DHHC-type | Mmu.11811 | XP_001114690 /// | 387.6217 | A | 714.7256 | P |
| | | containing 3 | | XP_001114737 /// | | | | |
| | | | | XP_001114753 | | | | |
| MmugDNA.42763.1.S1_at | ZFAND5 | zinc finger, AN1-type domain 5 | Mmu.1639 | XP_001096078 /// | 2.943856 | A | 138.3536 | P |
| | | | | XP_001096191 /// | | | | |
| | | | | XP_001096312 /// | | | | |
| | | | | XP_001096433 /// | | | | |
| | | | | XP_001096545 | | | | |
| MmugDNA.29066.1.S1_at | ZNRD1 | zinc ribbon domain containing 1 | Mmu.17470 | NP_001108417 /// | 87.50885 | A | 120.7655 | P |
| | | | | XP_001105355 /// | | | | |
| | | | | XP_001105431 | | | | |

TABLE 4
Immediate early (1-hr post stroke) biomarkers identified by RNA analysis.

| Gene identifier | Gene name | Amino Acid Sequence |
|---|---|---|
| NP_006546.1 | synaptobrevin homolog YKT6 | SEQ ID NO: 1 |
| NP_001776.1 | cytidine deaminase | SEQ ID NO: 2 |
| EAW60338.1 | hypothetical protein FLJ20232 | SEQ ID NO: 3 |
| EAW67321.1 | centrosomal protein 164 kDa | SEQ ID NO: 4 |
| EAW71459.1 | WD repeat domain 8 | SEQ ID NO: 5 |
| EAW85140.1 | zinc finger CCCH-type containing 7A | SEQ ID NO: 6 |
| EAW89539.1 | TIMP metallopeptidase inhibitor 2 | SEQ ID NO: 7 |
| EAW96888.1 | zinc finger CCCH-type containing 10 | SEQ ID NO: 8 |
| BAB47442.1 | KIAA1813 protein | SEQ ID NO: 9 |
| BAB59061.1 | Pex1p-634del690 | SEQ ID NO: 10 |
| AAH09411.1 | WDR77 protein | SEQ ID NO: 11 |
| NP_001078929.1 | catenin delta-1 isoform 1A | SEQ ID NO: 12 |
| NP_071426.1 | leucine-rich repeat-containing protein 4 precursor | SEQ ID NO: 13 |
| NP_001099038.1 | kinesin-like protein KIF13A isoform d | SEQ ID NO: 14 |
| BAG53572.1 | unnamed protein product | SEQ ID NO: 15 |
| BAG54027.1 | unnamed protein product | SEQ ID NO: 16 |
| BAG57307.1 | unnamed protein product | SEQ ID NO: 17 |
| BAG63947.1 | unnamed protein product | SEQ ID NO: 18 |
| BAG64130.1 | unnamed protein product | SEQ ID NO: 19 |
| BAG58900.1 | unnamed protein product | SEQ ID NO: 20 |
| NP_148978.2 | cyclin-dependent kinase 16 isoform 2 | SEQ ID NO: 21 |
| NP_001135741.1 | vitamin K-dependent gamma-carboxylase isoform 2 | SEQ ID NO: 22 |
| NP_631981.2 | nucleolar protein 6 gamma isoform | SEQ ID NO: 23 |
| AAM94901.1 | AF311906_1 LIR-D1 precursor | SEQ ID NO: 24 |
| AAH35404.1 | PTK2 protein | SEQ ID NO: 25 |
| NP_733840.1 | NLR family member X1 isoform 2 | SEQ ID NO: 26 |
| AAN75525.1 | Rap1-interacting adaptor molecule | SEQ ID NO: 27 |
| NP_001171187.1 | Krueppel-like factor 11 isoform b | SEQ ID NO: 28 |
| NP_001171726.1 | trimethyllysine dioxygenase, mitochondrial isoform 2 | SEQ ID NO: 29 |
| | precursor | |
| CAD91343.1 | cytochrome P450 | SEQ ID NO: 30 |
| NP_115652.2 | rhomboid domain-containing protein 1 | SEQ ID NO: 31 |
| NP_079480.2 | traB domain-containing protein | SEQ ID NO: 32 |
| NP_954574.1 | histone-lysine N-methyltransferase setd3 isoform b | SEQ ID NO: 33 |
| NP_000112.1 | erythropoietin receptor precursor | SEQ ID NO: 34 |
| NP_001453.1 | N-formyl peptide receptor 2 | SEQ ID NO: 35 |
| NP_002420.1 | matrix metalloproteinase-19 isoform rasi-1 preproprotein | SEQ ID NO: 36 |
| NP_003098.1 | transcription factor SOX-4 | SEQ ID NO: 37 |
| NP_003134.1 | single-stranded DNA-binding protein, mitochondrial | SEQ ID NO: 38 |
| | precursor | |
| AAH16977.2 | PBX3 protein | SEQ ID NO: 39 |
| NP_001973.2 | receptor tyrosine-protein kinase erbB-3 isoform 1 precursor | SEQ ID NO: 40 |
| CAH72013.1 | RIO kinase 1 (yeast) | SEQ ID NO: 41 |
| 2IRT | A Chain, Initial Crystallographic Analyses Of A | SEQ ID NO: 42 |
| | Recombinant Interleukin-1 Receptor Antagonist Protein | |
| BAA91249.1 | unnamed protein product | SEQ ID NO: 43 |
| NP_000447.2 | sulfite oxidase, mitochondrial precursor | SEQ ID NO: 44 |
| CAB86601.1 | xce | SEQ ID NO: 45 |
| NP_057692.1 | armadillo repeat-containing X-linked protein 1 | SEQ ID NO: 46 |
| NP_057696.2 | mitoferrin-1 | SEQ ID NO: 47 |
| NP_064530.1 | endophilin-B2 | SEQ ID NO: 48 |

TABLE 5
Early biomarkers (2-hr post stroke) biomarkers identified by RNA analysis.

| Gene identifier | Gene name | Amino Acid Sequence |
|---|---|---|
| NP_060288.3 | WD repeat-containing protein WRAP73 | SEQ ID NO: 49 |
| NP_001776.1 | cytidine deaminase | SEQ ID NO: 50 |
| NP_001128651.1 | palmitoyltransferase ZDHHC3 isoform 1 | SEQ ID NO: 51 |
| NP_004197.1 | vesicle-trafficking protein SEC22c isoform b | SEQ ID NO: 52 |
| NP_001001890.1 | runt-related transcription factor 1 isoform AML1b | SEQ ID NO: 53 |
| NP_000457.1 | peroxisome biogenesis factor 1 | SEQ ID NO: 54 |
| NP_071426.1 | leucine-rich repeat-containing protein 4 precursor | SEQ ID NO: 13 |
| NP_003134.1 | single-stranded DNA-binding protein, mitochondrial | SEQ ID NO: 55 |
| NP_001003700.1 | ras-responsive element-binding protein 1 isoform 3 | SEQ ID NO: 56 |
| NP_001099038.1 | kinesin-like protein KIF13A isoform d | SEQ ID NO: 57 |
| NP_877434.2 | E3 ubiquitin-protein ligase RNF144B | SEQ ID NO: 58 |
| NP_031381.2 | heat shock protein HSP 90-beta | SEQ ID NO: 59 |
| NP_001011516.1 | PDZ and LIM domain protein 5 isoform e | SEQ ID NO: 60 |
| NP_000815.1 | glycine receptor subunit beta isoform A precursor | SEQ ID NO: 61 |
| NP_060516.2 | angiogenic factor with G patch and FHA domains 1 | SEQ ID NO: 62 |
| NP_057113.1 | dehydrogenase/reductase SDR family member 7 precursor | SEQ ID NO: 63 |
| NP_954574.1 | histone-lysine N-methyltransferase setd3 isoform b | SEQ ID NO: 33 |
| NP_057696.2 | mitoferrin-1 | SEQ ID NO: 47 |
| NP_039258.1 | pro-neuregulin-1, membrane-bound isoform isoform HRG- | SEQ ID NO: 64 |
| | alpha | |
| NP_005598.3 | focal adhesion kinase 1 isoform b | SEQ ID NO: 65 |

TABLE 6
Late biomarkers (24-hr post stroke) biomarkers identified by RNA analysis.

| Gene identifier | Gene name | Amino Acid Sequence |
|---|---|---|
| NP_005944.1 | metallothionein-2 | SEQ ID NO: 66 |
| NP_057692.1 | armadillo repeat-containing X-linked protein 1 | SEQ ID NO: 46 |
| NP_001128250.1 | pre-B-cell leukemia transcription factor 3 isoform 2 | SEQ ID NO: 67 |
| NP_000031.1 | apolipoprotein C-III precursor | SEQ ID NO: 68 |
| NP_057696.2 | mitoferrin-1 | SEQ ID NO: 47 |
| NP_079480.2 | traB domain-containing protein | SEQ ID NO: 69 |
| NP_001128651.1 | palmitoyltransferase ZDHHC3 isoform 1 | SEQ ID NO: 70 |
| NP_000425.1 | sialidase-1 precursor | SEQ ID NO: 71 |
| NP_006238.1 | serine/threonine-protein phosphatase 5 isoform 1 | SEQ ID NO: 72 |
| NP_631981.2 | nucleolar protein 6 gamma isoform | SEQ ID NO: 73 |
| NP_057427.3 | centromere protein F | SEQ ID NO: 74 |
| \|NP_543153.1 | sodium-dependent phosphate transport protein 2C | SEQ ID NO: 75 |
| NP_001171187.1 | Krueppel-like factor 11 isoform b | SEQ ID NO: 28 |
| NP_000231.1 | amine oxidase | SEQ ID NO: 76 |
| NP_004160.3 | serine hydroxymethyltransferase, cytosolic isoform 1 | SEQ ID NO: 77 |
| NP_848695.1 | minor histocompatibility antigen H13 isoform 2 | SEQ ID NO: 78 |
| NP_056973.2 | mediator of RNA polymerase II transcription subunit 15 | SEQ ID NO: 79 |
| | isoform b | |
| NP_077007.1 | methylosome protein 50 | SEQ ID NO: 80 |
| NP_064505.1 | UDP-glucose:glycoprotein glucosyltransferase 1 precursor | SEQ ID NO: 81 |
| NP_001001890.1 | runt-related transcription factor 1 isoform AML1b | SEQ ID NO: 82 |
| NP_005598.3 | focal adhesion kinase 1 isoform b | SEQ ID NO: 83 |
| NP_061916.3 | amyloid beta A4 precursor protein-binding family B member | SEQ ID NO: 84 |
| | 1-interacting protein | |
| NP_060516.2 | angiogenic factor with G patch and FHA domains 1 | SEQ ID NO: 62 |
| NP_000923.1 | 1-phosphatidylinositol-4,5-bisphosphate phosphodiesterase | SEQ ID NO: 85 |
| | beta-3 isoform 1 | |
| NP_071426.1 | leucine-rich repeat-containing protein 4 precursor | SEQ ID NO: 13 |
| NP_443100.1 | immunoglobulin superfamily member 8 | SEQ ID NO: 86 |
| NP_006546.1 | synaptobrevin homolog YKT6 | SEQ ID NO: 1 |
| NP_001129247.1 | calcium channel flower homolog isoform b | SEQ ID NO: 87 |
| NP_071906.1 | 5-azacytidine-induced protein 2 isoform a | SEQ ID NO: 88 |
| NP_954574.1 | histone-lysine N-methyltransferase setd3 isoform b | SEQ ID NO: 33 |
| NP_001135741.1 | vitamin K-dependent gamma-carboxylase isoform 2 | SEQ ID NO: 22 |
| NP_001776.1 | cytidine deaminase | SEQ ID NO: 2 |
| \|NP_031381.2 | heat shock protein HSP 90-beta | SEQ ID NO: 59 |
| NP_054872.2 | zinc finger CCCH domain-containing protein 7A | SEQ ID NO: 6 |
| NP_115652.2 | rhomboid domain-containing protein 1 | SEQ ID NO: 31 |
| NP_001034750.1 | toll/interleukin-1 receptor domain-containing adapter protein | SEQ ID NO: 89 |
| | isoform a | |
| NP_055047.2 | vesicle-associated membrane protein 2 | SEQ ID NO: 90 |
| NP_000568.1 | interleukin-1 receptor antagonist protein isoform 3 | SEQ ID NO: 91 |
| NP_039258.1 | pro-neuregulin-1, membrane-bound isoform isoform HRG- | SEQ ID NO: 64 |
| | alpha | |
| NP_060288.3 | WD repeat-containing protein WRAP73 | SEQ ID NO: 49 |
| NP_598012.1 | decorin isoform c precursor | SEQ ID NO: 92 |
| NP_001973.2 | receptor tyrosine-protein kinase erbB-3 isoform 1 precursor | SEQ ID NO: 40 |
| NP_001166237.1 | forkhead box protein P2 isoform V | SEQ ID NO: 93 |
| NP_000457.1 | peroxisome biogenesis factor 1 | SEQ ID NO: 54 |
| NP_000112.1 | erythropoietin receptor precursor | SEQ ID NO: 34 |
| NP_001078929.1 | catenin delta-1 isoform 1A | SEQ ID NO: 12 |
| \|NP_001176.1 | zinc-alpha-2-glycoprotein precursor | SEQ ID NO: 94 |
| NP_001171597.1 | immunoglobulin lambda-like polypeptide 5 | SEQ ID NO: 95 |
| NP_077278.1 | matrix metalloproteinase-28 isoform 1 preproprotein | SEQ ID NO: 96 |

TABLE 7
Proteins differentially expressed in the NHP model following MCAO

| | | | pre | |
|---|---|---|---|---|
| 1-HR | Sequence ID | Sequence Name | Occlusion | 1 h |
| 47 | XP_001112525 | PREDICTED: similar to CD163 antigen isoform a [Macaca mulatta] | 0 | 12 |
| 146 | XP_001112106 | PREDICTED: similar to thyroid hormone receptor associated protein 2 [Macaca mulatta] | 0 | 5 |
| 145 | XP_001083301 | PREDICTED: cytochrome b-245, beta polypeptide (chronic granulomatous disease) isoform 1 [Macaca | 0 | 4 |
| | | mulatta] | | |
| 104 | XP_001083320 | PREDICTED: similar to protein kinase C, delta [Macaca mulatta] | 0 | 3 |
| 51 | XP_001090238 | PREDICTED: pyruvate kinase, muscle isoform 1 [Macaca mulatta] | 0 | 3 |
| 139 | XP_001111401 | PREDICTED: golgi autoantigen, golgin subfamily b, macrogolgin (with transmembrane signal), 1 | 0 | 3 |
| | | isoform 1 [Macaca mulatta] | | |
| 50 | NP_001038203 | pancreatic ribonuclease [Macaca mulatta] | 0 | 3 |
| 184 | XP_001117349 | PREDICTED: similar to alpha-2-plasmin inhibitor [Macaca mulatta] | 0 | 3 |
| 172 | XP_001104736 | PREDICTED: general transcription factor IIIC, polypeptide 4, 90 kDa [Macaca mulatta] | 0 | 3 |
| | | | pre | |
| 2-HR | Sequence ID | Sequence Name | Occlusion | 2 h |
| 47 | XP_001112525 | PREDICTED: similar to CD163 antigen isoform a [Macaca mulatta] | 0 | 6 |
| 150 | XP_001082953 | PREDICTED: similar to alpha 2 type IX collagen [Macaca mulatta] | 0 | 4 |
| 42 | XP_001115663 | PREDICTED: similar to AKT1 substrate 1 (proline-rich) isoform 1 [Macaca mulatta] | 0 | 4 |
| 104 | XP_001083320 | PREDICTED: similar to protein kinase C, delta [Macaca mulatta] | 0 | 3 |
| 50 | NP_001038203 | pancreatic ribonuclease [Macaca mulatta] | 0 | 3 |
| 5 | XP_001111499 | PREDICTED: similar to complement factor H isoform a precursor isoform 1 [Macaca mulatta] | 0 | 3 |
| 184 | XP_001117349 | PREDICTED: similar to alpha-2-plasmin inhibitor [Macaca mulatta] | 0 | 2 |
| 87 | XP_001096042 | PREDICTED: similar to serine palmitoyltransferase, long chain base subunit 2 [Macaca mulatta] | 0 | 2 |
| 142 | XP_001111185 | PREDICTED: transforming growth factor, beta-induced, 68 kDa isoform 1 [Macaca mulatta] | 0 | 2 |
| 17 | XP_001090341 | PREDICTED: similar to WD repeat domain 19 [Macaca mulatta] | 0 | 2 |
| 117 | XP_001088176 | PREDICTED: similar to CG32699-PA [Macaca mulatta] | 0 | 2 |
| 161 | XP_001084230 | PREDICTED: similar to chemokine-like factor superfamily 3 isoform a [Macaca mulatta] | 0 | 2 |
| 128 | XP_001114075 | PREDICTED: similar to T-cell immunomodulatory protein [Macaca mulatta] | 0 | 2 |
| 129 | XP_001113081 | PREDICTED: similar to filamin A interacting protein 1 isoform 1 [Macaca mulatta] | 0 | 2 |
| 137 | XP_001109018 | PREDICTED: zinc finger protein 443 [Macaca mulatta] | 0 | 2 |
| 26 | XP_001083469 | PREDICTED: similar to apolipoprotein L2 [Macaca mulatta] | 0 | 2 |
| 32 | XP_001086062 | PREDICTED: similar to MADS box transcription enhancer factor 2, polypeptide C (myocyte enhancer | 0 | 2 |
| | | factor 2C) isoform 1 [Macaca mulatta] | | |
| 49 | XP_001105319 | PREDICTED: similar to phosphorylated CTD interacting factor 1 isoform 1 [Macaca mulatta] | 0 | 2 |
| 59 | XP_001109556 | PREDICTED: delta-tubulin [Macaca mulatta] | 0 | 2 |
| 124 | XP_001082131 | PREDICTED: similar to receptor interacting protein 140 [Macaca mulatta] | 0 | 2 |
| 166 | XP_001088368 | PREDICTED: carbonic anhydrase IX isoform 1 [Macaca mulatta] | 0 | 2 |
| 24- | | | pre | |
| HR | Sequence ID | Sequence Name | Occlusion | 24 h |
| 104 | XP_001083320 | PREDICTED: similar to protein kinase C, delta [Macaca mulatta] | 0 | 12 |
| 134 | XP_001104018 | PREDICTED: similar to NOD9 protein isoform 2 isoform 1 [Macaca mulatta] | 0 | 6 |
| 109 | XP_001095858 | PREDICTED: aspartyl-tRNA synthetase [Macaca mulatta] | 0 | 4 |
| 136 | XP_001114645 | PREDICTED: RAS p21 protein activator 4 [Macaca mulatta] | 0 | 4 |
| 161 | XP_001084230 | PREDICTED: similar to chemokine-like factor superfamily 3 isoform a [Macaca mulatta] | 0 | 4 |
| 51 | XP_001090238 | PREDICTED: pyruvate kinase, muscle isoform 1 [Macaca mulatta] | 0 | 3 |
| 58 | NP_001107821 | NLR family, pyrin domain containing 1 [Macaca mulatta] | 0 | 3 |
| 78 | XP_001089332 | PREDICTED: similar to Proteasome subunit alpha type 1 (Proteasome component C2) (Macropain | 0 | 3 |
| | | subunit C2) (Multicatalytic endopeptidase complex subunit C2) (Proteasome nu chain) (30 kDa | | |
| | | prosomal protein) (PROS-30) [Macaca mulatta] | | |
| 95 | XP_001102929 | PREDICTED: chitotriosidase isoform 1 [Macaca mulatta] | 0 | 3 |
| 116 | XP_001098308 | PREDICTED: L-plastin isoform 1 [Macaca mulatta] | 0 | 3 |
| 139 | XP_001111401 | PREDICTED: golgi autoantigen, golgin subfamily b, macrogolgin (with transmembrane signal), 1 | 0 | 3 |
| | | isoform 1 [Macaca mulatta] | | |
| 150 | XP_001082953 | PREDICTED: similar to alpha 2 type IX collagen [Macaca mulatta] | 0 | 3 |
| 17 | XP_001090341 | PREDICTED: similar to WD repeat domain 19 [Macaca mulatta] | 0 | 2 |
| 18 | XP_001093056 | PREDICTED: similar to solute carrier family 24 member 4 isoform 1 precursor isoform 1 [Macaca | 0 | 2 |
| | | mulatta] | | |
| 36 | XP_001097844 | PREDICTED: similar to Histidine acid phosphatase domain containing 1 isoform 1 [Macaca mulatta] | 0 | 2 |
| 38 | XP_001104918 | PREDICTED: similar to Transcription factor E3 isoform 1 [Macaca mulatta] | 0 | 2 |
| 50 | NP_001038203 | pancreatic ribonuclease [Macaca mulatta] | 0 | 2 |
| 57 | XP_001100504 | PREDICTED: similar to PDZ domain-containing guanine nucleotide exchange factor I isoform 1 | 0 | 2 |
| | | [Macaca mulatta] | | |
| 62 | XP_001116691 | PREDICTED: suppressin [Macaca mulatta] | 0 | 2 |
| 63 | XP_001085867 | PREDICTED: similar to cofactor required for Sp1 transcriptional activation, subunit 2, 150 kDa [Macaca | 0 | 2 |
| | | mulatta] | | |
| 75 | XP_001117192 | PREDICTED: similar to thyroid hormone receptor-associated protein 5 [Macaca mulatta] | 0 | 2 |
| 80 | XP_001092767 | PREDICTED: 2-deoxyribose-5-phosphate aldolase homolog [Macaca mulatta] | 0 | 2 |
| 87 | XP_001096042 | PREDICTED: similar to serine palmitoyltransferase, long chain base subunit 2 [Macaca mulatta] | 0 | 2 |
| 113 | XP_001100715 | PREDICTED: zinc finger protein 639 [Macaca mulatta] | 0 | 2 |
| 128 | XP_001114075 | PREDICTED: similar to T-cell immunomodulatory protein [Macaca mulatta] | 0 | 2 |
| 129 | XP_001113081 | PREDICTED: similar to filamin A interacting protein 1 isoform 1 [Macaca mulatta] | 0 | 2 |
| 145 | XP_001083301 | PREDICTED: cytochrome b-245, beta polypeptide (chronic granulomatous disease) isoform 1 [Macaca | 0 | 2 |
| | | mulatta] | | |
| 146 | XP_001112106 | PREDICTED: similar to thyroid hormone receptor associated protein 2 [Macaca mulatta] | 0 | 2 |
| 148 | XP_001087105 | PREDICTED: hypothetical protein [Macaca mulatta] | 0 | 2 |
| 163 | NP_001123907 | toll-interleukin 1 receptor (TIR) domain containing adaptor protein [Macaca mulatta] | 0 | 2 |
| 184 | XP_001117349 | PREDICTED: similar to alpha-2-plasmin inhibitor [Macaca mulatta] | 0 | 2 |

TABLE 8
Biomarkers identified by the proteomics study

| | | Amino Acid |
|---|---|---|
| Gene identifier | Gene name | Sequence |
| | Immediate early stroke biomarkers, 1-hr post stroke | |
| NP_004235.3 | scavenger receptor cysteine-rich type 1 protein M130 isoform | SEQ ID NO: 97 |
| NP_056150.1 | mediator of RNA polymerase II transcription subunit 13-like | SEQ ID NO: 98 |
| NP_000388.2 | cytochrome b-245 heavy chain | SEQ ID NO: 99 |
| NP_006245.2 | protein kinase C delta type | SEQ ID NO: 100 |
| NP_001193726.1 | pyruvate kinase isozymes M1/M2 isoform d | SEQ ID NO: 101 |
| NP_004478.3 | Golgin subfamily B member 1 | SEQ ID NO: 102 |
| NP_002924.1 | ribonuclease pancreatic precursor | SEQ ID NO: 103 |
| NP_001157281.1 | WD repeat-containing protein 81 isoform 1 | SEQ ID NO: 104 |
| NP_036336.2 | general transcription factor 3C polypeptide 4 | SEQ ID NO: 105 |
| | Early stroke biomarkers, 2-hr post stroke | |
| NP_004235.3 | scavenger receptor cysteine-rich type 1 protein M130 isoform | SEQ ID NO: 97 |
| NP_001843.1 | collagen alpha-2(IX) chain precursor | SEQ ID NO: 106 |
| NP_001092103.1 | proline-rich AKT1 substrate 1 | SEQ ID NO: 107 |
| NP_006245.2 | protein kinase C delta type | SEQ ID NO: 100 |
| NP_002924.1 | ribonuclease pancreatic precursor | SEQ ID NO: 103 |
| NP_000177.2 | complement factor H isoform a precursor | SEQ ID NO: 108 |
| NP_001157281.1 | WD repeat-containing protein 81 isoform 1 | SEQ ID NO: 104 |
| NP_004854.1 | serine palmitoyltransferase 2 | SEQ ID NO: 109 |
| NP_000349.1 | transforming growth factor-beta-induced protein ig-h3 precursor | SEQ ID NO: 110 |
| NP_079408.3 | WD repeat-containing protein 19 | SEQ ID NO: 111 |
| NP_060309.2 | lysophosphatidylcholine acyltransferase 2 | SEQ ID NO: 112 |
| NP_653202.1 | CKLF-like MARVEL transmembrane domain-containing protein 3 | SEQ ID NO: 113 |
| NP_110417.2 | T-cell immunomodulatory protein precursor | SEQ ID NO: 114 |
| NP_056502.1 | filamin-A-interacting protein 1 | SEQ ID NO: 115 |
| NP_001074290.1 | zinc finger protein 799 | SEQ ID NO: 116 |
| NP_112092.1 | apolipoprotein L2 | SEQ ID NO: 117 |
| NP_001124477.1 | myocyte-specific enhancer factor 2C isoform 2 | SEQ ID NO: 118 |
| NP_071387.1 | phosphorylated CTD-interacting factor 1 | SEQ ID NO: 119 |
| NP_001180539.1 | tubulin delta chain isoform 3 | SEQ ID NO: 120 |
| NP_003480.2 | nuclear receptor-interacting protein 1 | SEQ ID NO: 121 |
| NP_001207.2 | carbonic anhydrase 9 precursor | SEQ ID NO: 122 |
| | Late stroke biomarkers, 24-hr post stroke | |
| NP_006245.2 | protein kinase C delta type | SEQ ID NO: 100 |
| NP_733840.1 | NLR family member X1 isoform 2 [Homo sapiens] | SEQ ID NO: 26 |
| NP_001340.2 | aspartyl-tRNA synthetase, cytoplasmic | SEQ ID NO: 123 |
| XP_003119104.1 | PREDICTED: putative Ras GTPase-activating protein 4B isoform 5 | SEQ ID NO: 124 |
| NP_653202.1 | CKLF-like MARVEL transmembrane domain-containing protein 3 | SEQ ID NO: 113 |
| NP_001193726.1 | pyruvate kinase isozymes M1/M2 isoform | SEQ ID NO: 101 |
| NP_127497.1 | NACHT, LRR and PYD domains-containing protein 1 isoform 1 | SEQ ID NO: 125 |
| NP_002777.1 | proteasome subunit alpha type-1 isoform 2 | SEQ ID NO: 126 |
| NP_003456.1 | chitotriosidase-1 precursor | SEQ ID NO: 127 |
| NP_002289.2 | plastin-2 | SEQ ID NO: 128 |
| NP_004478.3 | Golgin subfamily B member 1 | SEQ ID NO: 129 |
| NP_001843.1 | collagen alpha-2(IX) chain precursor | SEQ ID NO: 130 |
| NP_079408.3 | WD repeat-containing protein 19 | SEQ ID NO: 111 |
| NP_705932.2 | sodium/potassium/calcium exchanger 4 isoform 1 precursor | SEQ ID NO: 131 |
| NP_056031.2 | inositol hexakisphosphate and diphosphoinositol-pentakisphosphate | SEQ ID NO: 132 |
| | kinase 2 | |
| NP_006512.2 | transcription factor E3 | SEQ ID NO: 133 |
| NP_002924.1 | ribonuclease pancreatic precursor | SEQ ID NO: 103 |
| NP_001157861.1 | rap guanine nucleotide exchange factor 6 isoform 5 | SEQ ID NO: 134 |
| NP_066288.2 | deformed epidermal autoregulatory factor 1 homolog | SEQ ID NO: 135 |
| NP_004220.2 | mediator of RNA polymerase II transcription subunit 14 | SEQ ID NO: 136 |
| NP_005472.2 | mediator of RNA polymerase II transcription subunit 16 | SEQ ID NO: 137 |
| NP_057038.2 | putative deoxyribose-phosphate aldolase | SEQ ID NO: 138 |
| NP_004854.1 | serine palmitoyltransferase 2 | SEQ ID NO: 139 |
| NP_057415.1 | zinc finger protein 639 | SEQ ID NO: 140 |
| NP_110417.2 | T-cell immunomodulatory protein precursor | SEQ ID NO: 114 |
| NP_056502.1 | filamin-A-interacting protein 1 | SEQ ID NO: 115 |
| NP_000388.2 | cytochrome b-245 heavy chain | SEQ ID NO: 99 |
| NP_056150.1 | mediator of RNA polymerase II transcription subunit 13-like | SEQ ID NO: 98 |
| NP_689956.2 | BRCA1-associated ATM activator 1 | SEQ ID NO: 141 |
| NP_001034750.1 | toll/interleukin-1 receptor domain-containing adapter protein isoform a | SEQ ID NO: 142 |
| NP_001157281.1 | WD repeat-containing protein 81 isoform 1 | SEQ ID NO: 104 |

Sequence of Stroke Biomarkers

>gi|5730120|ref|NP_006546.1| synaptobrevin homolog YKT6 [Homo sapiens], SEQ ID NO: 1
MKLYSLSVLYKGEAKVVLLKAAYDVSSFSFFQRSSVQEFMTFTSQLIVERSSKGTRASVKEQDYLCHVYVRNDSLAGVVIADNEYPSRVA
FTLLEKVLDEFSKQVDRIDWPVGSPATIHYPALDGHLSRYQNPREADPMTKVQAELDETKIILHNTMESLLERGEKLDDLVSKSEVLGTQS
KAFYKTARKQNSCCAIM
>gi|11386157|ref|NP_001776.1| cytidine deaminase [Homo sapiens], SEQ ID NO: 2
[sequence omitted]
>gi|119580742|gb|EAW60338.1| hypothetical protein FLJ20232, isoform CRA_b [Homo sapiens],
SEQ ID NO: 3
MAGAGERKGKKDDNGIGTAIDFVLSNARLVLGVGGAAMLGIATLAVKRMYDRAISAPTSPTRLSHSGKRSWEEPNWMGSPRLLNRDMK
TGLSRSLQTLPTDSSTFDTDTFCPPRPKPVARKGQVDLKKSRLRMSLQEKLLTYYRNRAAIPAGEQARAKQAAVDICAELRSFLRAKLPDM
PLRDMYLSGSLYDDLQVVTADHIQLIVPLVLEQNLWSCIPGEDTIMNVPGFFLVRRENPEYFPRGSSYWDRCVVGGYLSPKTVADTFEKVV
AGSINWPAIGSLLDYVIRPAPPPEALTLEVQYERDKHLFIDFLPSVTLGDTVLVAKPHRLAQYDNLWRLSLRPAETARLRALDQADSGCRSL
CLKILKAICKSTPALGHLTASQLTNVILHLAQEEADWSPDMLADRFLQALRGLISYLEAGVLPSALNPKDKALKERSLRHQVRMMEVDSRL
NVSWKIQSLVGVWWPCFLPRQALLF
>gi|119587725|gb|EAW67321.1| centrosomal protein 164kDa, isoform CRA_d [Homo sapiens], SEQ ID NO: 4
[sequence omitted]
>gi|119591865|gb|EAW71459.1| WD repeat domain 8, isoform CRA_a [Homo sapiens], SEQ ID NO: 5
MNFSEVFKLSSLLCKFSPDGKYLASCVQYRLVVRDVNTLQILQLYTCLDQIQHIEWSADSLFILCAMYKRGLVQVWSLEQPEWHCKIDEGS
AGLVASCWSPDGRHILNTTEFHLRITVWSLCTKSVSYIKYPKACLQGITFTRDGRYMALAERRDCKDYVSIFVCSDWQLLRHFDTDTQDLT
GIEWAPNGCVLAVWDTCLEVRILNHVTWKMITEFGHPAAINDPKIVVYKEAEKSPQLGLGCLSFPPPRAGAGPLPSSESKYEIASVPVSLQT
LKPVTDRANPKIGIGMLAFSPDSYFLATRNDNIPNAVWVWDIQKLRLFAVLEQLSPVRAFQWDPQQPRLAICTGGS
RLYLWSPAGCMSVQVPGEGDFAVLSLCWHLSGDSMALLSKDHFCLCFLETEAVVGTACRQLGGHT
>gi|119605546|gb|EAW85140.1| zinc finger CCCH-type containing 7A, isoform CRA_b [Homo sapiens],
SEQ ID NO: 6
MSNVSEERRKRQQNIKEGLQFIQSPLSYPGTQEQYAVYLRALVRNLFNEGNDVYREHDWNNSISQYTEALNIADYAKSEEILIPKEIIEKLYI
NRIACYSNMGFHDKVLEDCNIVLSLNASNCKALYRKSKALSDLGRYKKAYDAVAKCSLAVPQDEHVIKLTQELAQKLGFKIRKAYVRAE
LSLKSVPGDGATKALNHSVEDIEPDLLTPRQEAVPVVSLPAPSFSHEVGSELASVPVMPLTSILPLQVEESALPSAVLANGGKMPFTMPEAFL
DDGDMVLGDELDDLLDSAPETNETVMMNGPGSLFASENFLGISSQPRNDFGNFFGSAVTKPSSSVTPRHPLEGTHELRQACQICFVKSGPK
LMDFTYHANIDHKCKKDILIGRIKNVEDKSWKKIRPRPTKTNYEGPYYICKDVAAEEECRYSGHCTFAYCQEEIDVWTLERKGAFSREAFF
GGNGKINLTVFKLLQEHLGEFIFLCEKCFDHKPRMISKRNKDNSTACSHPVTKHEFEDNKCLVHILRETTVKYSKIRSFHGQCQLDLCRHEV
RYGCLREDECFYAHSLVELKVWIMQNETGISHDAIAQESKRYWQNLEANVPGAQVLGNQIMPGFLNMKIKFVCAQCLRNGQVIEPDKNR
KYCSAKARHSWTKDRRAMRVMSIERKKWMNIRPLPTKKQMPLQFDLCNHIASGKKCQYVGNCSFAHSPEEREVWTYMKENGIQDMEQ
FYELWLKS
>gi|119609945|gb|EAW89539.1| TIMP metallopeptidase inhibitor 2, isoform CRA_b [Homo sapiens],
SEQ ID NO: 7
[sequence omitted]
>gi|119617294|gb|EAW96888.1| zinc finger CCCH-type containing 10, isoform CRA_a [Homo sapiens],
SEQ ID NO: 8
MSHAYFIHHRVWFRVCWLERHFFRRKRKSDRVGGSLSKLEDRQAAAATTAAAAEPSSDVEVETHRSPGLHLSYLSGHQEWQDKENPELG
GTRMPDRDSYANGTGSSGGGPGGGGSEEASGAGVGSGGASSDAICRDFLRNVCKRGKRCRYRHPDMSEVSNLGVSKNEFIFCHDFQNKE
CSRPNCRFIHGSKEDEDGYKKTGELPPRLRQKVAAGLGLSPADLPNGKEEVPICRDFLKGDCQRGAKCKFRHLQRDFEFDARGGGGTGGG
STGSVLPGRRHDLYDIYDLPDRGFEDHEPGPKRRRGGCCPPDGPHFESYEYSLAPPRGVECRLLEEENAMLRKRVEELKKQVSNLLATNEV
LLEQNAQFRNQAKVITLSSTAPATEQTLAPTVGTVATFNHGIAQTHTTLSSQALQPRPVSQQELVAPAGAPAAPPTNAAPPAAPPPPPPHLT
PEITPLSAALAQTIAQGMAPPPVSMAPVAVSVAPVAPVAVSMAQPLAGITMSHTTTPMVTYPIASQSMRITAMPH
>gi|14017843|dbj|BAB47442.1| KIAA1813 protein [Homo sapiens], SEQ ID NO: 9
ASATMAIVQTLPVPLEPAPEAATAPQAPVMGSVSSLISGRPCPGGPAPPRHHGPPGPTFFRQQDGLLRGGYEAQEPLCPAVPPRKAVPVTSF
TYINEDFRTESPPSPSSDVEDAREQRAHNAHLRGPPPKLIPVSGKLEKNMEKILIRPTAFKPVLPKPRGAPSLPSFMGPRATGLSGSQGSLTQL
FGGPASSSSSSSSSSAADKPLAFSGWASGCPSGTLSDSGRNSLSSLPTYSTGGAEPTTSSPGGHLPSHGSGRGALPGPARGVPTGPSHSDSGR
SSSSKSTGSLGGRVAGGLLGSGTRASPDSSSCGERSPPPPPPPPSDEALLHCVLEGKLRDREAELQQLRDSLDENEATMCQAYEERQRHWQ
REREALREDCAAQAQRAQRAQQLLQLQVFQLQQEKRQLQDDFAQLLQEREQLERRCATLEREQRELGPRLEETKWEVCQKSGEISLLKQ
QLKESQAELVQKGSELVALRVALREARATLRVSEGRARGLQEAARARELELEACSQELQRHRQEAEQLREKAGQLDAEAAGLREPPVPPA
TADPFLLAESDEAKVQRAAAGVGGSLRAQVERLRVELQRERRRGEEQRDSFEGERLAWQAEKEQVIRYQKQLQHNYIQMYRRNRQLEQ
ELQQLSLELEARELADLGLAEQAPCICLEEITATEI
>gi|14289171|dbj|BAB59061.1| Pex1p-634del690 [Homo sapiens], SEQ ID NO: 10
MWGSDRLAGAGGGGAAVTVAFTNARDCFLHLPRRLVAQLHLLQNQAIEVVWSHQPAFLSWVEGRHFSDQGENVAEINRQVGQKLGLSN
GGQVFLKPCSHVVSCQQVEVEPLSADDWEILELHAVSLEQHLLDQIRIVFPKAIFPVWVDQQTYIFIQIVALIPAASYGRLETDTKLLIQPKTR
RAKENTFSKADAEYKKLHSYGRDQKGMMKELQTKQLQSNTVGITESNENESEIPVDSSSVASLWTMIGSIFSFQSEKKQETSWGLTEINAF
KNMQSKVVPLDNIFRVCKSQPPSIYNASATSVFHKHCAIHVFPWDQEYFDVEPSFTVTYGKLVKLLSPKQQQSKTKQNVLSPEKEKQMSE
PLDQKKIRSDHNEEDEKACVLQVVWNGLEELNNAIKYTKNVEVLHLGKVWIPDDLRKRLNIEMHAVVRITPVEVTPKIPRSLKLQPRENLP
KDISEEDIKTVFYSWLQQSTTTMLPLVISEEEFIKLETKDGLKEFSLSIVHSWEKEKDKNIFLLSPNLLQKTTIQVLLDPMVKEENSEEIDFILPF
LKLSSLGGVNSLGVSSLEHITHSLLGRPLSRQLMSLVAGLRNGALLLTGGKGSGKSTLAKAICKEAFDKLDAHVERVDCKALRALNDMIKE
FISMGSLVALIATSQSQQSLHPLLVSAQGVHIFQCVQHIQPPNQEQRCEILCNVIKNKLDCDINKFTDLDLQHVAKETGGFVARDFTVLVDR
AIHSRLSRQSISTREKLVLTTLDFQKALRGFLPASLRSVNLHKPRDLGWDKIGGLHEVRQILMDTIQLPAKYPELFANLPIRQRTGILLYGPPG
TGKTLLAGVIARESRMNFISVKGPELLSKYIGASEQAVRDIFIRAQAAKPCILFFDEFESIAPRRGHDNTGVTDRVVNQLLTQLDGVEGLQGV
YVLAATSRPDLIDPALLRPGRLDKCVYCPPPDQVSRLEILNVLSDSLPLADDVDLQHVASVTDSFTGADLKALLYNAQLEALHGMLLSSGL
QDGSSSSDSDLSLSSMVFLNHSSGSDDSAGDGECGLDQSLVSLEMSEILPDESKFNMYRLYFGSSYESELGNGTSSDLSSQCLSAPSSMTQD
LPGVPGKDQLFSQPPVLRTASQEGCQELTQEQRDQLRADISIIKGRYRSQSGEDESMNQPGPIKTRLAISQSHLMTALGHTRPSISEDDWKN
FAELYESFQNPKRRKNQSGTMFRPGQKVTLA
>gi|14495615|gb|AAH09411.1| WDR77 protein [Homo sapiens], SEQ ID NO: 11
[sequence omitted]
>gi|146231938|ref|NP_001078929.1| catenin delta-1 isoform 1A [Homo sapiens], SEQ ID NO: 12
MDDSEVESTASILASVKEQEAQFEKLTRALEEERRHVSAQLERVRVSPQDANPLMANGTLTRRHQNGRFVGDADLERQKFSDLKLNGPQ
DHSHLLYSTIPRMQEPGQIVETYTEEDPEGAMSVVSVETSDDGTTRRTETTVKKVVKTVTTRTVQPVAMGPDGLPVDASSVSNNYIQTLG
RDFRKNGNGGPGPYVGQAGTATLPRNFHYPPDGYSRHYEDGYPGGSDNYGSLSRVTRIEERYRPSMEGYRAPSRQDVYGPQPQVRVGGS
SVDLHRFHPEPYGLEDDQRSMGYDDLDYGMMSDYGTARRTGTPSDPRRRLRSYEDMIGEEVPSDQYYWAPLAQHERGSLASLDSLRKG
GPPPPNWRQPELPEVIAMLGFRLDAVKSNAAAYLQHLCYRNDKVKTDVRKLKGIPVLVGLLDHPKKEVHLGACGALKNISFGRDQDNKIA
IKNCDGVPALVRLLRKARDMDLTEVITGTLWNLSSHDSIKMEIVDHALHALTDEVIIPHSGWEREPNEDCKPRHIEWESVLTNTAGCLRNV
SSERSEARRKLRECDGLVDALIFIVQAEIGQKDSDSKLVENCVCURNLSYQVHREIPQAERYQEAAPNVANNTGPHAASCFGAKKGKGK
KPIEDPANDTVDFPKRTSPARGYELLFQPEVVRIYISLLKESKTPAILEASAGAIQNLCAGRWTYGRYIRSALRQEKALSAIADLLTNEHERV
VKAASGALRNLAVDARNKELIGKHAIPNLVKNLPGGQQNSSWNFSEDTVISILNTINEVIAENLEAAKKLRETQGIEKLVLINKSGNRSEKEV
RAAALVLQTIWGYKELRKPLEKEGWKKSDFQVNLNNASRSQSSHSYDDSTLPLIDRNQKSDKKPDREEIQMSNMGSNTKSLDNNYSTPNE
RGDHNRTLDRSGDLGDMEPLKGTTPLMQKI
>gi|15029530|ref|NP_071426.1| leucine-rich repeat-containing protein 4 precursor [Homo sapiens],
SEQ ID NO: 13
MKLLWQVTVHHHTWNAILLPFVYLTAQVWILCAAIAAAASAGPQNCPSVCSCSNQFSKVVCTRRGLSEVPQGIPSNTRYLNLMENNIQMI
QADTFRHLHHLEVLQLGRNSIRQIEVGAFNGLASLNTLELFDNWLTVIPSGAFEYLSKLRELWLRNNPIESIPSYAFNRVPSLMRLDLGELKK
LEYISEGAFEGLFNLKYLNLGMCNIKDMPNLTPLVGLEELEMSGNHFPEIRPGSFHGLSSLKKLWVMNSQVSLIERNAFDGLASLVELNLAH
NNLSSLPHDLFTPLRYLVELHLHHNPWNCDCDILWLAWWLREYIPTNSTCCGRCHAPMHMRGRYLVEVDQASFQCSAPFIMDAPRDLNIS
EGRMAELKCRTPPMSSVKWLLPNGTVLSHASRHPRISVLNDGTLNFSHVLLSDTGVYTCMVTNVAGNSNASAYLNVSTAELNTSNYSFFT
TVTVETTEISPEDTTRKYKPVPTTSTGYQPAYTTSTTVLIQTTRVPKQVAVPATDTTDKMQTSLDEVMKTTKIIIGCFVAVTLLAAAMLIVFY
KLRKRHQQRSTVTAARTVEIIQVDEDIPAATSAAATAAPSGVSGEGAVVLPTIHDHINYNTYKPAHGAHWTENSLGNSLHPTVTTISEPYIIQ
THTKDKVQETQI
>gi|157738629|ref|NP_001099038.1| kinesin-like protein KIF13A isoform d [Homo sapiens],
SEQ ID NO: 14
MSDTKVKVAVRVRPMNRRELELNTKCVVEMEGNQTVLHPPPSNTKQGERKPPKVFAFDYCFWSMDESNTTKYAGQEVVFKCLGEGILE
KAFQGYNACIFAYGQTGSGKSFSMMGHAEQLGLIPRLCCALFKRISLEQNESQTFKVEVSYMEIYNEKVRDLLDPKGSRQSLKVREHKVLG
PYVDGLSQLAVTSFEDIESLMSEGNKSRTVAATNMNEESSRSHAVFNIIITQTLYDLQSGNSGEKVSKVSLVDLAGSERVSKTGAAGERLKE
GSNINKSLTTLGLVISSLADQAAGKGKSKFVPYRDSVLTWLLKDNLGGNSQTSMIATISPAADNYEETLSTLRYADRAKRIVNHAVVNEDP
NAKVIRELREEVEKLREQLSQAEAMKAPELKEKLEESEKLIKELTVTWEEKLRKTEEIAQERQRQLESMGISLEMSGIKVGDDKCYLVNLN
ADPALNELLVYYLKDHTRVGADTSQDIQLFGIGIQPQHCEIDIASDGDVTLTPKENARSCVNGTLVCSTTQLWHGDRILWGNNHFFRINLPK
RKRRDWLKDFEKETGPPEHDLDAASEASSEPDYNYEFAQMEVIMKTLNSNDPVQNVVQVLEKQYLEEKRSALEEQRLMYERELEQLRQQ
LSPDRQPQSSGPDRLAYSSQTAQQKVTQWAEERDELFRQSLAKLREQLVKANTLVREANFLAEEMSKLTDYQVTLQIPAANLSANRKRG
AIVSEPAIQVRRKGKSTQVWTIEKLENKLIDMRDLYQEWKEKVPEAKRLYGKRGDPFYEAQENHNLIGVANVFLECLFCDVKLQYAVPIIS
QQGEVAGRLHVEVMRVTGAVPERVVEDDSSENSSESGSLEVVDSSGEIIHRVKKLTCRVKIKEATGLPLNLSNFVFCQYTFWDQCESTVA
APVVDPEVPSPQSKDAQYTVTFSHCKDYVVNVTEEFLEFISDGALAIEVWGHRCAGNGSSIWEVDSLHAKTRTLHDRWNEVTRRIEMWISI
LELNELGEYAAVELHQAKDVNTGGIFQLRQGHSRRVQVTVKPVQHSGTLPLMVEAILSVSIGCVTARSTKLQRGLDSYQEEDLNCVRERW
SDALIKRREYLDEQIKKVSNKTEKTEDDVEREAQLVEQWVGLTEERNAVLVPAPGSGIPGAPADWIPPPGMETHIPVLFLDLNADDLSANE
QLVGPHASGVNSILPKEHGSQFFYLPIIKHSDDEVSATASWDSSVHDSVHLNRVTPQNERIYLIVKTTVQLSHPAAMELVLRKRIAANIYNK
QSFTQSLKRRISLKNIFYSCGVTYEIVSNIPKATEEIEDRETLALLAARSENEGTSDGETYIEKYTRGVLQVENILSLERLRQAVTVKEALSTK
ARHIRRSLSTPNVHNVSSSRPDLSGFDEDDKGWPENQLDMSDYSSSYQDVACYGTLPRDSPRRNKEGCTSETPHALTVSPFKAFSPQPPKF
FKPLMPVKEEHKKRIALEARPLLSQEDSEEEENELEAINRKLISSQPYVPVEFADFSVYNASLENREWFSSKVDLSNSRVLEKEVSRSPTTSSI
TSGYFSHSASNATLSDMVVPSSDSSDQLAIQTKDADSTEHSTPSLVHDFRPSSNKELTEVEKGLVKDKIIVVPLKENSALAKGSPSSQSIPEK
NSKSLCRTGSCSELDACPSKISQPARGFCPREVTVEHTTNILEDHSFTEFMGVSEGKDFDGLTDSSAGELSSRRSLPNKTGGKTVSDGLHHP
SQLHSKLENDQGGTTSR
>gi|193783661|dbjBAG53572.1| unnamed protein product [Homo sapiens], SEQ ID NO: 15
[sequence omitted]
>gi|193784874|dbjBAG54027.1| unnamed protein product [Homo sapiens], SEQ ID NO: 16
[sequence omitted]
>gi|194375926|dbjBAG57307.1| unnamed protein product [Homo sapiens], SEQ ID NO: 17
MGKEIPTDAPWEAQHADKWDKMTMKELIDKICWTKTARRFAYLFVNINVTSEPHEVSALWFLWYVKQCGGTTRIFSVTNGGQERKFVG
GSGQVSERIMDLLGDQVKLNHPVTHVDQSSDNIIIETLNHEHYECKYVINAIPPTLTAKIHFRPELPAERNQLIQRLPMGAVIKCMMYYKEA
FWKKKDYCGCMIIEDEDAPISITLDDTKPDGSLPAIMGFILARKADRLAKLHKEIRKKKICELYAKVLGSQEALHPVHYEEKNWCEEQYSG
GCYTAYFPPGIMTQYGRVIRQPVGRIFFAGTETATKWSGYMEGAVEAGERAAREVLNGLGKVTEKDIWVQEPESKDVPAVEITHTFWERN
LPSVSGLLKIIGFSTSVTALGFVLYKYKLLPRS
>gi|194380360|dbjBAG63947.1| unnamed protein product [Homo sapiens], SEQ ID NO: 18
[sequence omitted]
>gi|194381124|dbj|BAG64130.1| unnamed protein product [Homo sapiens], SEQ ID NO: 19
[sequence omitted]
>gi|194382290|dbj|BAG58900.1| unnamed protein product [Homo sapiens], SEQ ID NO: 20
MAARLLRGSLRVLGGHRAPRQLPAARCSHSGGEERLETPSAKKLTDIGIRRIFSPEHDIFRKSVRKFFQEEVIPHHSEWEKAGEVSREVWEK
AGKQGLLGVNIAEHLGGIGGDLYSAAIVWEEQ
>gi|197333744|ref|NP_148978.2|cyclin-dependent kinase 16 isoform 2 [Homo sapiens], SEQ ID NO: 21
MQSEIAMDRMKKIKRQLSMTLRGGRGIDKTNGAPEQIGLDESGGGGGSDPGEAPTRAAPGELRSARGPLSSAPEIVHEDLKMGSDGESDQ
ASATSSDEVQSPVRVRMRNHPPRKISTEDINKRLSLPADIRLPEGYLEKLTLNSPIFDKPLSRRLRRVSLSEIGFGKLETYIKLDKLGEGTYAT
VYKGKSKLTDNLVALKEIRLEHEEGAPCTAIREVSLLKDLKHANIVTLHDIIHTEKSLTLVFEYLDKDLKQYLDDCGNIINMHNVKLFLFQLL
RGLAYCHRQKVLHRDLKPQNLLINERGELKLADFGLARAKSIPTKTYSNEVVTLWYRPPDILLGSTDYSTQIDMWGVGCIFYEMATGRPLF
PGSTVEEQLHFIFRILGTPTEETWPGILSNEEFKTYNYPKYRAEALLSHAPRLDSDGADLLTKLLQFEGRNRISAEDAMKHPFFLSLGERIHKL
PDTTSIFALKEIQLQKEASLRSSSMPDSGRPAFRVVDTEF
>gi|214010149|ref|NP_001135741.1| vitamin K-dependent gamma-carboxylase isoform 2 [Homo sapiens],
SEQ ID NO: 22
MAVSAGSARTSPSSGFLMVLDIPQERGLSSLDRKYLDGLDVCRFPLLDALRPLPLDWMYLVYTIMFLGALGMMLGLCYRISCVLFLLPYW
YVFLLDKTSWNNHSYLYGLLAFQLTFMDANHYWSVDGLLNAHRRNAHVPLWNYAVLRGQIFIVYFIAGVKKLDADWVEGYSMEYLSR
HWLFSPFKLLLSEELTSLLVVHWGGLLLDLSAGFLLFFDVSRSIGLFFVSYFHCMNSQLFSIGMFSYVMLASSPLFCSPEWPRKLVSYCPRRL
QQLLPLKAAPQPSVSCVYKRSRGKSGQKPGLRHQLGAAFTLLYLLEQLFLPYSHFLTQGYNNWTNGLYGYSWDMMVHSRSHQHVKITY
RDGRTGELGYLNPGVFTQSRRWKDHADMLKQYATCLSRLLPKYNVTEPQIYFDIWVSINDRFQQRIFDPRVDIVQAAWSPFQRTSWVQPL
LMDLSPWRAKLQEIKSSLDNHTEVVFIADFPGLHLENFVSEDLGNTSIQLLQGEVTVELVAEQKNQTLREGEKMQLPAGEYHKVYTTSPSP
SCYMYVYVNTTELALEQDLAYLQELKEKVENGSETGPLPPELQPLLEGEVKGGPEPTPLVQTFLRRQQRLQEIERRRNTPFHERFFRFLLRK
LYVFRRSFLMTCISLRNLILGRPSLEQLAQEVTYANLRPFEAVGELNPSNTDSSHSNPPESNPDPVHSEF
>gi|22212931|ref|NP_631981.2| nucleolar protein 6 gamma isoform [Homo sapiens], SEQ ID NO: 23
MGPAPAGEQLRGATGEPEVMEPALEGTGKEGKKASSRKRTLAEPPAKGLLQPVKLSRAELYKEPTNEELNRLRETEILFHSSLLRLQVEELL
KEVRLSEKKKDRIDAFLREVNQRVVRVPSVPETELTDQAWLPAGVRVPLHQVPYAVKGCFRFLPPAQVTVVGSYLLGTCIRPDINVDVAL
TMPREILQDKDGLNQRYFRKRALYLAHLAHHLAQDPLFGSVCFSYTNGCHLKPSLLLRPRGKDERLVTVRLHPCPPPDFFRPCRLLPTKNN
VRSAWYRGQSPAGDGSPEPPTPRYNTWVLQDTVLESHLQLLSTILSSAQGLKDGVALLKVWLRQRELDKGQGGFTGFLVSMLVVFLVSTR
KIHTTMSGYQVLRSVLQFLATTDLTVNGISLCLSSDPSLPALADFHQAFSVVFLDSSGHLNLCADVTASTYHQVQHEARLSMMLLDSRADD
GFHLLLMTPKPMIRAFDHVLHLRPLSRLQAACHRLKLWPELQDNGGDYVSAALGPLTTLLEQGLGARLNLLAHSRPPVPEWDISQDPPKH
KDSGTLTLGLLLRPEGLTSVLELGPEADQPEAAKFRQFWGSRSELRRFQDGAIREAVVWEAASMSQKRLIPHQVVTHLLALHADIPETCVH
YVGGPLDALIQGLKEASSTKGRMVMSRGGELVMVPNVEAILEDFAVLGEGLVQTVEARSERWTV
>gi|22266726|gb|AAM94901.1| AF311906_1 LIR-D1 precursor [Homo sapiens], SEQ ID NO: 24
[sequence omitted]
>gi|23273417|gb|AAH35404.1| PTK2 protein [Homo sapiens], SEQ ID NO: 25
MAAAYLDPNLNHTPNSSTKTHLGTGMERSPGAMERVLKWHYFESNSEPTTWASIIRHGDATDVRGIIQKIVDSHKVKHVACYGFRLSHL
RSEEVHWLHVDMGVSSVREKYELAHPPEEWKYELRIRYLPKGFLNQFTEDKPTLNFFYQQVKSDYMLEIADQVDQEIALKLGCLEIRRSY
WEMRGNALEKKSNYEVLEKDVGLKRFFPKSLLDSVKAKTLRKLIQQTFRQFANLNREESILKFFEILSPVYRFDKECFKCALGSSWIISVELA
IGPEEGISYLTDKGCNPTHLADFTQVQTIQYSNSEDKDRKGMLQLKIAGAPEPLTVTAPSLTIAENMADLIDGYCRLVNGTSQSFIIRPQKEG
ERALPSIPKLANSEKQGMRTHAVSVSETDDYAEIIDEEDTYTMPSTRDYEIQRERIELGRCIGEGQFGDVHQGIYMSPENPALAVAIKTCKN
CTSDSVREKFLQEALTMRQFDHPHIVKLIGVITENPVWIIMELCTLGELRSFLQVRKYSLDLASLILYAYQLSTALAYLESKRFVHRDIAARN
VLVSSNDCVKLGDFGLSRYMEDSTYYKASKGKLPIKWMAPESINFRRFTSASDVWMFGVCMWEILMHGVKPFQGVKNNDVIGRIENGER
LPMPPNCPPTLYSLMTKCWAYDPSRRPRFTELKAQLSTILEEEKAQQEERMRMESRRQATVSWDSGGSDEAPPKPSRPGYPSPRSSEGFYP
SPQHMVQTNHYQDSTVLDLRGIGQVLPTHLMEERLIRQQQEMEEDQRWLEKEERFLKPDVRLSRGSIDREDGSLQGPIGNQHIYQPVGKP
DPAAPPKKPPRPGAPGHLGSLASLSSPADSYNEGVKLQPQEISPPPTANLDRSNDKVYENVTGLVKAVIEMSSKIQPAPPEEYVPMVKEVGL
ALRTLLATVDETIPLLPASTHREIEMAQKLLNSDLGELINKMKLAQQYVMTSLQQEYKKQMLTAAHALAVDAKNLLDVIDQARLKMLGQ
TRPH
>gi|25777610|ref|NP_733840.1| NLR family member X1 isoform 2 [Homo sapiens], SEQ ID NO: 26
MRWGHHLPRASWGSGFRRALQRPDDRIPFLIHWSWPLQGERPFGPPRAFIRHHGSSVDSAPPPGRHGRLFPSASATEAIQRHRRNLAEWFS
RLPREERQFGPTFALDTVHVDPVIRESTPDELLRPPAELALEHQPPQAGLPPLALSQLFNPDACGRRVQTVVLYGTVGTGKSTLVRKMVLD
WCYGRLPAFELLIPFSCEDLSSLGPAPASLCQLVAQRYTPLKEVLPLMAAAGSHLLFVLHGLEHLNLDFRLAGTGLCSDPEEPQEPAAIIVNL
LRKYMLPQASILVTTRPSAIGRIPSKYVGRYGEICGFSDTNLQKLYFQLRLNQPYCGYAVGGSGVSATPAQRDHLVQMLSRNLEGHHQIAA
ACFLPSYCWLVCATLHFLHAPTPAGQTLTSIYTSFLRLNFSGETLDSTDPSNLSLMAYAARTMGKLAYEGVSSRKTYFSEEDVCGCLEAGIR
TEEEFQLLHIFRRDALRFFLAPCVEPGRAGTFVFTVPAMQEYLAALYIVLGLRKTTLQKVGKEVAELVGRVGEDVSLVLGIMAKLLPLRALP
LLFNLIKVVPRVFGRMVGKSREAVAQAMVLEMFREEDYYNDDVLDQMGASILGVEGPRRHPDEPPEDEVFELFPMFMGGLLSAHNRAVL
AQLGCPIKNLDALENAQAIKKKLGKLGRQVLPPSELLDHLFFHYEFQNQRFSAEVLSSLRQLNLAGVRMTPVKCTVVAAVLGSGRHALDE
VNLASCQLDPAGLRTLLPVFLRARKLGLQLNSLGPEACKDLRDLLLHDQCQITTLRLSNNPLTAAGVAVLMEGLAGNTSVTHLSLLHTGLG
DEGLELLAAQLDRNRQLQELNVAYNGAGDTAALALARAAREHPSLELLQGVAIQMCWKLPLLPYAHLWTPRMPSHWCFLLILMPPLPQW
YDGLVAPRGRCT
>gi|26000235|gb|AAN75525.1| Rap1-interacting adaptor molecule [Homo sapiens], SEQ ID NO: 27
MGESSEDIDQMFSTLLGEMDLLTQSLGVDTLPPPDPNPPRAEFNYSVGFKDLNESLNALEDQDLDALMADLVADISEAEQRTIQAQKESLQ
NQHHSASLQASIFSGAASLGYGTNVAATGISQYEDDLPPPPADPVLDLPLPPPPPEPLSQEEEEAQAKADKIKLALEKLKEAKVKKLVVKVH
MNDNSTKSLMVDERQLARDVLDNLFEKTHCDCNVDWCLYEIYPELQIERFFEDHENVVEVLSDWTRDTENKILFLEKEEKYAVFKNPQNF
YLDNRGKKESKETNEKMNAKNKESLLEESFCGTSIIVPELEGALYLKEDGKKSWKRRYFLLRASGIYYVPKGKTKTSRDLACFIQFENVNIY
YGTQHKMKYKAPTDYCFVLKHPQIQKESQYIKYLCCDDTRTLNQWVMGIRIAKYGKTLYDNYQRAVAKAGLASRWTNLGTVNAAAPA
QPSTGPKTGTTQPNGQIPQATHSVSAVLQEAQRHAETSKDKKPALGNHHDPAVPRAPHAPKSSLPPPPPVRRSSDTSGSPATPLKAKGTGG
GGLPAPPDDFLPPPPPPPPLDDPELPPPPPDFMEPPPDFVPPPPPSYAGIAGSELPPPPPPPAPAPAPVPDSARPPPAVAKRPPVPPKRQENPGH
PGGAGGGEQDFMSDLMKALQKKRGNVS
>gi|295148161|ref|NP_001171187.1| Krueppel-like factor 11 isoform b [Homo sapiens], SEQ ID NO: 28
MDICESILERKRHDSERSTCSILEQTDMEAVEALVCMSSWGQRSQKGDLLRIRPLTPVSDSGDVTTTVHMDAATPELPKDFHSLSTLCITPP
QSPDLVEPSTRTPVSPQVTDSKACTATDVLQSSAVVARALSGGAERGLLGLEPVPSSPCRAKGTSVIRHTGESPAACFPTIQTPDCRLSDSRE
GEEQLLGHFETLQDTHLTDSLLSTNLVSCQPCLHKSGGLLLTDKGQQAGWPGAVQTCSPKNYENDLPRKTTPLISVSVPAPPVLCQMIPVT
GQSSMLPAFLKPPPQLSVGTVRPILAQAAPAPQPVFVGPAVPQGAVMLVLPQGALPPPAPCAANVMAAGNTKLLPLAPAPVFITSSQNCVP
QVDFSRRRNYVCSFPGCRKTYFKSSHLKAHLRTHTGEKPFNCSWDGCDKKFARSDELSRHRRTHTGEKKFVCPVCDRRFMRSDHLTKHA
RRHMTTKKIPGWQAEVGKLNRIASAESPGSPLVSMPASA
>gi|296317249|ref|NP_001171726.1| trimethyllysine dioxygenase, mitochondrial isoform 2 precursor
[Homo sapiens] SEQ ID NO: 29
MWYHRLSHLHSRLQDLLKGGVIYPALPQPNFKSLLPLAVHWHHTASKSLTCAWQQHEDHFELKYANTVMRFDYVWLRDHCRSASCYNS
KTHQRSLDTASVDLCIKPKTIRLDETTLFFTWPDGHVTKYDLNWLVKNSYEGQKQKVIQPRILWNAEIYQQAQVPSVDCQSFLETNEGLKK
FLQNFLLYGIAFVENVPPTQEHTEKLAERISLIRETIYGRMWYFTSDFSRGDTAYTKLALDRHTDTTYFQEPCGIQVFHCLKHEGTGGRTLL
VDGFYAAEQVLQKAPEEFELLSKVPLKHEYIEDVGECHNHMIGIGPVLNIYPWNKELYLIRLFKEKQNTVNRQWNSSLQCDIPERILTYRHF
VSGTSIEHRGSLI
>gi|30840237|emb|CAD91343.1| cytochrome P450 [Homo sapiens], SEQ ID NO: 30
MDLIPNFAMETWVLVATSLVLLYIYGTHSHGLFKKLGIPGPTPLPFLGNILSYHKGFCMFDMECHKKYGKVWGFYDGQQPVLAITDPDMI
KTVLVKECYSVFTNRRPFGPVGFMKSAISIAEDEEWKRLRSLLSPTFTSGKLKEMVPIIAQYGDVLVRNLRREAETGKPVTLKDVFGAYSM
DVITSTSFGVNIDSLNNPQDPFVENTKKLLRFDFLDPFFLSITVFPFLIPILEVLNICVFPREVTNFLRKSVKRMKESRLEDTQKHRVDFLQLMI
DSQNSKETESHKALSDLELVAQSIIFIFAGYETTSSVLSFIMYELATHPDVQQKLQEEIDAVLPNKAPPTYDTVLQMEYLDMVVNETLRLFPI
AMRLERVCKKDVEINGMFIPKGVVVMIPSYALHRDPKYWTEPEKFLPERFSKKNKDNIDPYIYTPFGSGPRNCIGMRFALMNMKLALIRVL
QNFSFKPCKETQIPLKLSLGGLLQPEKPVVLKVESRDGTVSGA
>gi|33300639|ref|NP_115652.2| rhomboid domain-containing protein 1 [Homo sapiens], SEQ ID NO: 31
MQRRSRGINTGLILLLSQIFHVGINNIPPVTLATLALNIWFFLNPQKPLYSSCLSVEKCYQQKDWQRLLLSPLHEIADDWHLYFNMASMLWK
GINLERRLGSRWFAYVITAFSVLTGVVYLLLQFAVAEFMDEPDFKRSCAVGFSGVLFALKVLNNHYCPGGFVNILGFPVPNRFACWVELVA
IHLFSPGTSFAGHLAGILVGLMYTQGPLKKIMEACAGGFSSSVGYPGRQYYFNSSGSSGYQDYYPHGRPDHYEEAPRNYDTYTAGLSEEE
QLERALQASLWDRGNTRNSPPPYGFHLSPEEMRRQRLHRFDSQ
>gi|33342278|ref|NP_079480.2| traB domain-containing protein [Homo sapiens], SEQ ID NO: 32
MDGEEQQPPHEANVEPVVPSEASEPVPRVLSGDPQNLSDVDAFNLLLEMKLKRRRQRPNLPRTVTQLVAEDGSRVYVVGTAHFSDDSKR
DVVKTIREVQPDVVVVELCQYRVSMLKMDESTLLREAQELSLEKLQQAVRQNGLMSGLMQMLLLKVSAHITEQLGMAPGGEFREAFKEA
SKVPFCKFHLGDRPIPVTFKRAIAALSFWQKVRLAWGLCFLSDPISKDDVERCKQKDLLEQMMAEMIGEFPDLHRTIVSERDVYLTYMLRQ
AARRLELPRASDAEPRKCVPSVVVGVVGMGHVPGIEKNWSTDLNIQEIMTVPPPSVSGRVSRLAVKAAFFGLLGYSLYWMGRRTASLVLS
LPAAQYCLQRVTEARHK
>gi|40068483|ref|NP_954574.1| histone-lysine N-methyltransferase setd3 isoform b [Homo sapiens],
SEQ ID NO: 33
MGKKSRVKTQKSGTGATATVSPKEILNLTSELLQKCSSPAPGPGKEWEEYVQIRTLVEKIRKKQKGLSVTFDGKREDYFPDLMKWASENG
ASVEGFEMVNFKEEGFGLRATRDIKAEELFLWVPRKLLMTVESAKNSVLGPLYSQDRILQAMGNIALAFHLLCERASPNSFWQPYIQTLPSE
YDTPLYFEEDEVRYLQSTQAIHDVFSQYKNTARQYAYFYKVIQTHPHANKLPLKDSFTYEDYRWAVSSVMTRQNQIPTEDGSRVTLALIP
LWDMCNHTNGLTPEDSFALAVASA
>gi|4503591|ref|NP_000112.1| erythropoietin receptor precursor [Homo sapiens], SEQ ID NO: 34
MDHLGASLWPQVGSLCLLLAGAAWAPPPNLPDPKFESKAALLAARGPEELLCFTERLEDLVCFWEEAASAGVGPGNYSFSYQLEDEPWKL
CRLHQAPTARGAVRFWCSLPTADTSSFVPLELRVTAASGAPRYHRVIHINEVVLLDAPVGLVARLADESGHVVLRWLPPPETPMTSHIRYE
VDVSAGNGAGSVQRVEILEGRTECVLSNLRGRTRYTFAVRARMAEPSFGGFWSAWSEPVSLLTPSDLDPLILTLSLILVVILVLLTVLALLSH
RRALKQKIWPGIPSPESEFEGLFTTHKGNFQLWLYQNDGCLWWSPCTPFTEDPPASLEVLSERCWGTMQAVEPGTDDEGPLLEPVGSEHA
QDTYLVLDKWLLPRNPPSEDLPGPGGSVDIVAMDEGSEASSCSSALASKPSPEGASAASFEYTILDPSSQLLRPWTLCPELPPTPPHLKYLYL
VVSDSGISTDYSSGDSQGAQGGLSDGPYSNPYENSLIPAAEPLPPSYVACS
>gi|4503781|ref|NP_001453.1| N-formyl peptide receptor 2 [Homo sapiens], SEQ ID NO: 35
METNFSTPLNEYEEVSYESAGYTVLRILPLVVLGVTFVLGVLGNGLVIWVAGFRMTRTVTTICYLNLALADFSFTATLPFLIVSMAMGEKW
PFGWFLCKLIHIVVDINLFGSVFLIGFIALDRCICVLHPVWAQNHRTVSLAMKVIVGPWILALVLTLPVFLFLTTVTIPNGDTYCTFNFASWGG
TPEERLKVAITMLTARGIIRFVIGFSLPMSIVAICYGLIAAKIFIKKGMIKSSRPLRVLTAVVASFFICWFPFQLVALLGTVWLKEMLFYGKYKII
DILVNPTSSLAFFNSCLNPMLYVFVGQDFRERLIHSLPTSLERALSEDSAPTNDTAANSASPPAETELQAM
>gi|4505213|ref|NP_002420.1| matrix metalloproteinase-19 isoform rasi-1 preproprotein [Homo
sapiens], SEQ ID NO: 36
MNCQQLWLGFLLPMTVSGRVLGLAEVAPVDYLSQYGYLQKPLEGSNNFKPEDITEALRAFQEASELPVSGQLDDATRARMRQPRCGLED
PFNQKTLKYLLLGRWRKKHLTFRILNLPSTLPPHTARAALRQAFQDWSNVAPLTFQEVQAGAADIRLSFHGRQSSYCSNTFDGPGRVLAH
ADIPELGSVHFDEDEFWTEGTYRGVNLRIIAAHEVGHALGLGHSRYSQALMAPVYEGYRPHFKLHPDDVAGIQALYGKKSPVIRDEEEEET
ELPTVPPVPTEPSPMPDPCSSELDAMMLGPRGKTYAFKGDYVWTVSDSGPGPLFRVSALWEGLPGNLDAAVYSPRTQWIHFFKGDKVWR
YINFKMSPGFPKKLNRVEPNLDAALYWPLNQKVFLFKGSGYWQWDELARTDFSSYPKPIKGLFTGVPNQPSAAMSWQDGRVYFFKGKV
YWRLNQQLRVEKGYPRNISHNWMHCRPRTIDTTPSGGNTTPSGTGITLDTTLSATETTFEY
>gi|4507163|ref|NP_003098.1| transcription factor SOX-4 [Homo sapiens], SEQ ID NO: 37
MVQQTNNAENTEALLAGESSDSGAGLELGIASSPTPGSTASTGGKADDPSWCKTPSGHIKRPMNAFMVWSQIERRKIMEQSPDMHNAEIS
KRLGKRWKLLKDSDKIPFIREAERLRLKHMADYPDYKYRPRKKVKSGNANSSSSAAASSKPGEKGDKVGGSGGGGHGGGGGGGSSNAG
GGGGGASGGGANSKPAQKKSCGSKVAGGAGGGVSKPHAKLILAGGGGGGKAAAAAAASFAAEQAGAAALLPLGAAADHHSLYKARTP
SASASASSAASASAALAAPGKHLAEKKVKRVYLFGGLGTSSSPVGGVGAGADPSDPLGLYEEEGAGCSPDAPSLSGRSSAASSPAAGRSPA
DHRGYASLRAASPAPSSAPSHASSSASSHSSSSSSSGSSSSDDEFEDDLLDLNPSSNFESMSLGSFSSSSALDRDLDFNFEPGSGSHFEFPDYC
TPEVSEMISGDWLESSISNLVFTY
>gi|4507231|ref|NP_003134.1| single-stranded DNA-binding protein, mitochondrial precursor [Homo
sapiens], SEQ ID NO: 38
MFRRPVLQVLRQFVRHESETTTSLVLERSLNRVHLLGRVGQDPVLRQVEGKNPVTIFSLATNEMWRSGDSEVYQLGDVSQKTTWHRISVF
RPGLRDVAYQYVKKGSRIYLEGKIDYGEYMDKNNVRRQATTIIADNIIFLSDQTKEKE
>gi|48257122|gb|AAH16977.2| PBX3 protein [Homo sapiens], SEQ ID NO: 39
EKTGLSIRGAQEEDPPDPQLMRLDNMLLAEGVSGPEKGGGSAAAAAAAAASGGSSDNSIEHSDYRAKLTQIRQIYHTELEKYEQACNEFTT
HVMNLLREQSRTRPISPKEIERMVGIIHRKFSSIQMQLKQSTCEAVMILRSRFLDARRKRRNFSKQATEILNEYFYSHLSNPYPSEEAKEELA
KKCSITVSQSLVKDPKERGSKGSDIQPTSVVSNWFGNKRIRYKKNIGKFQEEANLYAAKTAVTAAHAVAAAVQNNQTNSPTTPNSGSSGS
FNLPNSGDMFMNMQSLNGDSYQGSQVGANVQSQVDTLRHVINQTGGYSDGLGGNSLYSPHNLNANGGWQDATTPSSVTSPTEGPGSVH
SDTSN
>gi|547921001ref|NP_001973.2| receptor tyrosine-protein kinase erbB-3 isoform 1 precursor [Homo
sapiens], SEQ ID NO: 40
MRANDALQVLGLLFSLARGSEVGNSQAVCPGTLNGLSVTGDAENQYQTLYKLYERCEVVMGNLEIVLTGHNADLSFLQWIREVTGYVLV
AMNEFSTLPLPNLRVVRGTQVYDGKFAIFVMLNYNTNSSHALRQLRLTQLTEILSGGVYIEKNDKLCHMDTIDWRDIVRDRDAEIVVKDN
GRSCPPCHEVCKGRCWGPGSEDCQTLTKTICAPQCNGHCFGPNPNQCCHDECAGGCSGPQDTDCFACRHFNDSGACVPRCPQPLVYNKL
TFQLEPNPHTKYQYGGVCVASCPHNFVVDQTSCVRACPPDKMEVDKNGLKMCEPCGGLCPKACEGTGSGSRFQTVDSSNIDGFVNCTKI
LGNLDFLITGLNGDPWHKIPALDPEKLNVFRTVREITGYLNIQSWPPHMHNFSVFSNLTTIGGRSLYNRGFSLLIMKNLNVTSLGFRSLKEIS
AGRIYISANRQLCYHHSLNWTKVLRGPTEERLDIKHNRPRRDCVAEGKVCDPLCSSGGCWGPGPGQCLSCRNYSRGGVCVTHCNFLNGEP
REFAHEAECFSCHPECQPMEGTATCNGSGSDTCAQCAHFRDGPHCVSSCPHGVLGAKGPIYKYPDVQNECRPCHENCTQGCKGPELQDC
LGQTLVLIGKTHLTMALTVIAGLVVIFMMLGGTFLYWRGRRIQNKRAMRRYLERGESIEPLDPSEKANKVLARIFKETELRKLKVLGSGVF
GTVHKGVWIPEGESIKIPVCIKVIEDKSGRQSFQAVTDHMLAIGSLDHAHIVRLLGLCPGSSLQLVTQYLPLGSLLDHVRQHRGALGPQLLL
NWGVQIAKGMYYLEEHGMVHRNLAARNVLLKSPSQVQVADFGVADLLPPDDKQLLYSEAKTPIKWMALESIHFGKYTHQSDVWSYGVT
VWELMTFGAEPYAGLRLAEVPDLLEKGERLAQPQICTIDVYMVMVKCWMIDENIRPTFKELANEFTRMARDPPRYLVIKRESGPGIAPGPE
PHGLTNKKLEEVELEPELDLDLDLEAEEDNLATTTLGSALSLPVGTLNRPRGSQSLLSPSSGYMPMNQGNLGESCQESAVSGSSERCPRPVS
LHPMPRGCLASESSEGHVTGSEAELQEKVSMCRSRSRSRSPRPRGDSAYHSQRHSLLTPVTPLSPPGLEEEDVNGYVMPDTHLKGTPSSRE
GTLSSVGLSSVLGTEEEDEDEEYEYMNRRRRHSPPHPPRPSSLEELGYEYMDVGSDLSASLGSTQSCPLHPVPIMPTAGTTPDEDYEYMNR
QRDGGGPGGDYAAMGACPASEQGYEEMRAFQGPGHQAPHVHYARLKTLRSLEATDSAFDNPDYWHSRLFPKANAQRT
>gi|55661618|emb|CAH72013.1| RIO kinase 1 (yeast) [Homo sapiens], SEQ ID NO: 41
MSRVVPGQFDDADSSDSENRDLKTVKEKDDILFEDLQDNVNENGEGEIEDEEEEGYDDDDDDWDWDEGVGKLAKGYVWNGGSNPQAN
RQTSDSSSAKMSTPADKVLRKFENKINLDKLNVTDSVINKVTEKSRQKEADMYRIKDKADRATVEQVLDPRTRMILFKMLTRGIITEINGCI
STGKEANVYHASTANGESRAIKIYKTSILVFKDRDKYVSGEFRFRHGYCKGNPRKMVKTWAEKEMRNLIRLNTAEIPCPEPIMLRSHVLVM
SFIGKDDMPAPLLKNVQLSESKARELYLQVIQYMRRMYQDARLVHADLSEFNMLYHGGGVYBDVSQSVEHDHPHALEFLRKDCANVND
FFMRHSVAVMTVRELFEFVTDPSITHENMDAYLSKAMEIASQRTKEERSSQDHVDEEVFKRAYIPRTLNEVKNYERDMDBMKLKEEDMA
MNAQQDNILYQTVTGLKKDLSGVQKVPALLENQVEERTCSDSEDIGSSECSDTDSEEQGDHARPKKHTTDPDIDKKERKKMVKEAQREK
RKNKIPKHVKKRKEKTAKTKKGK
>gi|640248|pdb|2IRT| A Chain A, Initial Crystallographic Analyses Of A Recombinant Interleukin-1
Receptor Antagonist Protein, SEQ ID NO: 42
RPSGRKSSKMQAFRIWDVNQKTFYLRNNQLVAGYLQGPNVNLEEKIDVVPIEPHALFLGIHGGKMCLSCVKSGDETRLQLEAVNITDLSEN
RKQDKRFAFIRSDSGPTTSFESAACPGWFLCTAMEADQPVSLTNMPDEGVMVTKFYFQEDE
>gi|7020726|dbj|BAA91249.1| unnamed protein product [Homo sapiens], SEQ ID NO: 43
MWGACKVKVHDSLATISITLRRYLRLGATMAKSKFEYVRDFEADDTCLAHCWVVVRLDGRNFHRFAEKHNFAKPNDSRALQLMTKCAQ
TVMEELEDIVIAYGQSDEYSFVFKRKTNWFKRRASKFMTHVASQFASSYVFYWRDYFEDQPLLYPPGFDGRVVVYPSNQTLKDYLSWRQ
ADCHINNLYNTVFWALIQQSGLTPVQAQGRLQGTLAADKNEILFSEFNINYNNEPPMYRKGTVLIWQKVDEVMTKEIKLPTEMEGKKMA
VTRTRTKPVPLHCDIIGDAFWKEHPEILDEDS
>gi|74099694|ref|NP_000447.2| sulfite oxidase, mitochondrial precursor [Homo sapiens],
SEQ ID NO: 44
MLLLHRAVVLRLQQACRLKSIPSRICIQACSTNDSFQPQRPSLTFSGDNSSTQGWRVMGTLLGLGAVLAYQDHRCRAAQESTHIYTKEEVS
SHTSPETGIWVTLGSEVFDVTEFVDLHPGGPSKLMLAAGGPLEPFWALYAVHNQSHVRELLAQYKIGELNPEDKVAPTVETSDPYADDPV
RHPALKVNSQRPFNAEPPPELLTENYITPNPIFFTRNHLPVPNLDPDTYRLHVVGAPGGQSLSLSLDDLHNFPRYEITVTLQCAGNRRSEMT
QVKEVKGLEWRTGAISTARWAGARLCDVLAQAGHQLCETEAHVCFEGLDSDPTGTAYGASIPLARAMDPEAEVLLAYEMNGQPLPRDH
GFPVRVVVPGVVGARHVKWLGRVSVQPEESYSHWQRRDYKGFSPSVDWETVDFDSAPSIQELPVQSAITEPRDGETVESGEVTIKGYAWS
GGGRAVIRVDVSLDGGLTWQVAKLDGEEQRPRKAWAWRLWQLKAPVPAGQKELNIVCKAVDDGYNVQPDTVAPIWNLRGVLSNAWH
RVHVYVSP
>gl17529553|emb|CAB86601.1| xce [Homo sapiens], SEQ ID NO: 45
[sequence omitted]
>gi|7706143|ref|NP_057692.1| armadillo repeat-containing X-linked protein 1 [Homo sapiens],
SEQ ID NO: 46
MGRTREAGCVAAGVVIGAGACYCVYRLAWGRDENEKIWDEDEESTDTSEIGVETVKGAKTNAGAGSGAKLQGDSEVKPEVSLGLEDCP
GVKEKAHSGSHSGGGLEAKAKALFNTLKEQASAKAGKGARVGTISGNRTLAPSLPCPGGRGGGCHPTRSGSRAGGRASGKSKGKARSKS
TRAPATTWPVRRGKFNFPYKIDDILSAPDLQKVLNILERTNDPFIQEVALVTLGNNAAYSFNQNAIRELGGVPIIAKLIKTKDPIIREKTYNAL
NNLSVNAENQGKIKTYISQVCDDTMVCRLDSAVQMAGLRLLTNMTVTNHYQHLLSYSFPDFFALLFLGNHFTKIQIMKLIINFTENPAMTR
ELVSCKVPSELISLFNKEWDREILLNILTLFENINDNIKNEGLASSRKEFSRSSLFFLFKESGVCVKKIKALANHNDLVVKVKVLKVLTKL
>gi|82775373|ref|NP_057696.2| mitoferrin-1 [Homo sapiens], SEQ ID NO: 47
MELRSGSVGSQAVARRMDGDSRDGGGGKDATGSEDYENLPTSASVSTHMTAGAMAGILEHSVMYPVDSVKTRMQSLSPDPKAQYTSIY
GALKKIMRTEGFWRPLRGVNVMIMGAGPAHAMYFACYENMKRTLNDVFHHQGNSHLANGIAGSMATLLHDAVMNPAEVVKQRLQMY
NSQHRSAISCIRTVWRTEGLGAFYRSYTTQLTMNIPFQSIHFITYEFLQEQVNPHRTYNPQSHIISGGLAGALAAAATTPLDVCKTLLNTQEN
VALSLANISGRLSGMANAFRTVYQLNGLAGYFKGIQARVIYQMPSTAISWSVYEFFKYFLTKRQLENRAPY
>gi|9910352|ref|NP_064530.1| endophilin-B2 [Homo sapiens], SEQ ID NO: 48
MDFNMKKLASDAGIFFTRAVQFTEEKFGQAEKTELDAHFENLLARADSTKNWTEKILRQTEVLLQPNP_SARVEEFLYEKLDRKVPSRVTN
GELLAQYMADAASELGPTTPYGKTLIKVAEAEKQLGAAERDFIHTASISFLTPLRNFLEGDWKTISKERRLLQNRRLDLDACKARLKKAKA
AEAKATTVPDFQETRPRNYILSASASALWNDEVDKAEQELRVAQTEFDRQAEVTRLLLEGISSTHVNHLRCLHEFVKSQTTYYAQCYRHM
LDLQKQLGRFPGTFVGTTEPASPPLSSTSPTTAAATMPVVPSVASLAPPGEASLCLEEVAPPASGTRKARVLYDYEAADSSELALLADELITV
YSLPGMDPDWLIGERGNKKGKVPVTYLELLS
>gi|224586777|ref|NP_060288.3| WD repeat-containing protein WRAP73 [Homo sapiens], SEQ ID NO: 49
MNFSEVFKLSSLLCKFSPDGKYLASCVQYRLVVRDVNTLQILQLYTCLDQIQHIEWSADSLFILCAMYKRGLVQVWSLEQPEWHCKIDEGS
AGLVASCWSPDGRHILNTTEFHLRITVWSLCTKSVSYIKYPKACLQGITFTRDGRYMALAERRDCKDYVSIFVCSDWQLLRHFDTDTQDLT
GIEWAPNGCVLAVWDTCLEYKILLYSLDGRLLSTYSAYEWSLGIKSVAWSPSSQFLAVGSYDGKVRILNHVTWKMITEFGHPAAINDPKIV
VYKEAEKSPQLGLGCLSFPPPRAGAGPLPSSESKYEIASVPVSLQTLKPVTDRANPKIGIGMLAFSPDSYFLATRNDNIPNAVWVWDIQKLR
LFAVLEQLSPVRAFQWDPQQPRLAICTGGSRLYLWSPAGCMSVQVPGEGDFAVLSLCWHLSGDSMALLSKDHFCLCFLETEAVVGTACR
QLGGHT
>gi|11386157|ref|NP_001776.1| cytidine deaminase [Homo sapiens], SEQ ID NO: 50
[sequence omitted]
>gi|206597477|ref|NP_001128651.1| palmitoyltransferase ZDHHC3 isoform 1 [Homo sapiens],
SEQ ID NO: 51
MMLIPTHHFRNIERKPEYLQPEKCVPPPYPGPVGTMWFIRDGCGIACAIVTWFLVLYAEFVVLFVMLIPSRDYVYSIINGIVFNLLAFLALAS
HCRAMLTDPGAVPKGNATKEFIESLQLKPGQVVYKCPKCCSIKPDRAHHCSVCKRCIRKMDHHCPWVNNCVGENNQKYFVLFTMYIALI
SLHALIMVGFHFLHCFEEDWTKCSSFSPPTTVILLILLCFEGLLFLIFTSVMFGTQVHSICTDETGIEQLKKEERRWAKKTKWMNMKAVFGH
PFSLGWASPFATPDQGKADPYQYVV
>gi|4759088|ref|NP_004197.1| vesicle-trafficking protein SEC22c isoform b [Homo sapiens],
SEQ ID NO: 52
MSVIFFACVVRVRDGLPLSASTDFYHTQDFLEWRRRLKSLALRLAQYPGRGSAEGCDFSIHFSSFGDVACMAICSCQCPAAMAFCFLETLW
WEFTASYDTTCIGLASRPYAFLEFDSIIQKVKWHFNYVSSSQMECSLEKIQEELKLQPPAVLTLEDTDVANGVMNGHTPMHLEPAPNFRME
PVTALGILSLILNIMCAALNLIRGVHLAEHSLQVAHEEIGNILAFLVPFVACIFQDPRSWFCWLDQTS
>gi|49574546|ref|NP_001001890.1| runt-related transcription factor 1 isoform AML1b [Homo sapiens],
SEQ ID NO: 53
MRIPVDASTSRRFTPPSTALSPGKMSEALPLGAPDAGAALAGKLRSGDRSMVEVLADHPGELVRTDSPNFLCSVLPTHWRCNKTLPIAFKV
VALGDVPDGTLVTVMAGNDENYSAELRNATAAMKNQVARFNDLRFVGRSGRGKSFTLTITVFTNPPQVATYHRAIKITVDGPREPRRHR
QKLDDQTKPGSLSFSERLSELEQLRRTAMRVSPHHPAPTPNPRASLNHSTAFNPQPQSQMQDTRQIQPSPPWSYDQSYQYLGSIASPSVHP
ATPISPGRASGMTTLSAELSSRLSTAPDLTAFSDPRQFPALPSISDPRMHYPGAFTYSPTPVTSGIGIGMSAMGSATRYHTYLPPPYPGSSQA
QGGPFQASSPSYHLYYGASAGSYQFSMVGGERSPPRILPPCTNASTGSALLNPSLPNQSDVVEAEGSHSNSPTNMAPSARLEEAVWRPY
>gi|4505725|ref|NP_000457.1| peroxisome biogenesis factor 1 [Homo sapiens], SEQ ID NO: 54
MWGSDRLAGAGGGGAAVTVAFTNARDCFLHLPRRLVAQLHLLQNQAIEVVWSHQPAFLSWVEGRHFSDQGENVAEINRQVGQKLGLSN
GGQVFLKPCSHVVSCQQVEVEPLSADDWEILELHAVSLEQHLLDQIRIVFPKAIFPVWVDQQTYIFIQIVALIPAASYGRLETDTKLLIQPKTR
RAKENTFSKADAEYKKLHSYGRDQKGMMKELQTKQLQSNTVGITESNENESEIPVDSSSVASLWTMIGSIFSFQSEKKQETSWGLTEINAF
KNMQSKVVPLDNIFRVCKSQPPSIYNASATSVFHKHCAIHVFPWDQEYFDVEPSFTVTYGKLVKLLSPKQQQSKTKQNVLSPEKEKQMSE
PLDQKKIRSDHNEEDEKACVLQVVWNGLEELNNAIKYTKNVEVLHLGKVWIPDDLRKRLNIEMHAVVRITPVEVTPKIPRSLKLQPRENLP
KDISEEDIKTVFYSWLQQSTTTMLPLVISEEEFIKLETKDGLKEFSLSIVHSWEKEKDKNIFLLSPNLLQKTTIQVLLDPMVKEENSEEIDFILPF
LKLSSLGGVNSLGVSSLEHITHSLLGRPLSRQLMSLVAGLRNGALLLTGGKGSGKSTLAKAICKEAFDKLDAHVERVDCKALRGKRLENIQ
KTLEVAFSEAVWMQPSVVLLDDLDLIAGLPAVPEHEHSPDAVQSQRLAHALNDMIKEFISMGSLVALIATSQSQQSLHPLLVSAQGVHIFQ
CVQHIQPPNQEQRCEILCNVIKNKLDCDINKFTDLDLQHVAKETGGFVARDFTVLVDRAIHSRLSRQSISTREKLVLTTLDFQKALRGFLPAS
LRSVNLHKPRDLGWDKIGGLHEVRQILMDTIQLPAKYPELFANLPIRQRTGILLYGPPGTGKTLLAGVIARESRMNFISVKGPELLSKYIGAS
EQAVRDIFIRAQAAKPCILFFDEFESIAPRRGHDNTGVTDRVVNQLLTQLDGVEGLQGVYVLAATSRPDLIDPALLRPGRLDKCVYCPPPDQ
VSRLEILNVLSDSLPLADDVDLQHVASVTDSFTGADLKALLYNAQLEALHGMLLSSGLQDGSSSSDSDLSLSSMVFLNHSSGSDDSAGDGE
CGLDQSLVSLEMSEILPDESKFNMYRLYFGSSYESELGNGTSSDLSSQCLSAPSSMTQDLPGVPGKDQLFSQPPVLRTASQEGCQELTQEQR
DQLRADISIIKGRYRSQSGEDESMNQPGPIKTRLAISQSHLMTALGHTRPSISEDDWKNFAELYESFQNPKRRKNQSGTMFRPGQKVTLA
>gi|4507231|ref|NP_003134.1| single-stranded DNA-binding protein, mitochondrial precursor [Homo
sapiens] SEQ ID NO: 55
MFRRPVLQVLRQFVRHESETTTSLVLERSLNRVHLLGRVGQDPVLRQVEGKNPVTIFSLATNEMWRSGDSEVYQLGDVSQKTTWHRISVF
RPGLRDVAYQYVKKGSRIYLEGKIDYGEYMDKNNVRRQATTIIADNIIFLSDQTKEKE
>gi|270132935|ref|NP_001003700.1| ras-responsive element-binding protein 1 isoform 3 [Homo
sapiens], SEQ ID NO: 56
MTSSSPAGLEGSDLSSINTMMSAVMSVGKVTENGGSPQGIKSPSKPPGPNRIGRRNQETKEEKSSYNCPLCEKICTTQHQLTMHIRQHNTD
TGGADHSCSICGKSLSSASSLDRHMLVHSGERPYKCTVCGQSFTTNGNMHRHMKIHEKDPNSATATAPPSPLKRRRLSSKRKLSHDAESE
REDPAPAKKMVEDGQSGDLEKKADEVFHCPVCFKEFVCKYGLETHMETHSDNPLRCDICCVTFRTHRGLLRHNALVHKQLPRDAMGRPF
IQNNPSIPAGFHDLGFTDFSCRKFPRISQAWCETNLRRCISEQHRFVCDTCDKAFPMLCSLALHKQTHVAADQGQEKPQATPLPGDALDQK
GFLALLGLQHTKDVRPAPAEEPLPDDNQAIQLQTLKCQLPQDPGCTNLLSLSPFEAASLGGSLTVLPATKDSIKHLSLQPFQKGFIIQPDSSIV
VKPISGESAIELADIQQILKMAASAPPQISLPPFSKAPAAPLQAIFKHMPPLKPKPLVTPRTVVATSTPPPLINAQQASPGCISPSLPPPPLKLLK
GSVEAASNAHLLQSKSGTQPHAATRLSLQQPRAELPGQPEMKTQLEQDSBEALLPLSMEAKIKQEITEGELKAFMTAPGGKKTPAMRKVL
YPCRFCNQVFAFSGVLRAHVRSHLGISPYQCNICDYIAADKAALIRHLRTHSGERPYICKICHYPFTVKANCERHLRKKHLKATRKDIEKNI
EYVSSSAAELVDAFCAPDTVCRLCGEDLKHYRALRIHMRTHCGRGLGGGHKGRKPFECKECSAAFAAKRNCIHHILKQHLHVPEQDIESY
VLAADGLGPAEAPAAEASGRGEDSGCAALGDCKPLTAFLEPQNGFLHRGPTQPPPPHVSIKLEPASSFAVDFNEPLDFSQKGLALVQVKQE
NISFLSPSSLVPYDCSMEPIDLSIPKNFRKGDKDLATPSEAKKPEEEAGSSEQPSPCPAPGPSLPVTLGPSGILESPMAPAPAATPEPPAQPLQG
PVQLAVPIYSSALVSSPPLVGSSALLSGTALLRPLRPKPPLLLPKPPVTEELPPLASIAQIISSVSSAPTLLKTKVADPGPASTGSNTTASDSLGG
SVPKAATTATPAATTSPKESSEPPAPASSPEAASPTEQGPAGTSKKRGRKRGMRSRPRANSGGVDLDSSGEFASIEKMLATTDTNKFSPFLQ
TAEDNTQDEVAGAPADHHGPSDEEQGSPPEDKLLRAKRNSYTNCLQKITCPHCPRVFPWASSLQRHMLTHTGQKPFPCQKCDAFFSTKSN
CERHQLRKHGVTTCSLRRNGLIPQSKESDVGSHDSTGERPYKCQTCERTFTLKHSLVRHQRIHQKARHAKHHGKDSDKEERGEEDSENES
THSGNNAVSENEAELAPNASNHMAVTRSRKEGLASATKDCSHREEKVTAGWPSEPGQGDLNPESPAALGQDLLEPRSKRPAHPILATADG
ASQLVGME
>gi|157738629|ref|NP_001099038.1| kinesin-like protein KIF13A isoform d [Homo sapiens],
SEQ ID NO: 57
MSDTKVKVAVRVRPMNRRELELNTKCVVEMEGNQTVLHPPPSNTKQGERKPPKVFAFDYCFWSMDESNTTKYAGQEVVFKCLGEGILE
KAFQGYNACIFAYGQTGSGKSFSMMGHAEQLGLIPRLCCALFKRISLEQNESQTFKVEVSYMEIYNEKVRDLLDPKGSRQSLKVREHKVLG
PYVDGLSQLAVTSFEDIESLMSEGNKSRTVAATNMNEESSRSHAVFNIIITQTLYDLQSGNSGEKVSKVSLVDLAGSERVSKTGAAGERLKE
GSNINKSLTTLGLVISSLADQAAGKGKSKFVPYRDSVLTWLLKDNLGGNSQTSMIATISPAADNYEETLSTLRYADRAKRIVNHAVVNEDP
NAKVIRELREEVEKLREQLSQAEAMKAPELKEKLEESEKLIKELTVTWEEKLRKTEEIAQERQRQLESMGISLEMSGIKVGDDKCYLVNLN
ADPALNELLVYYLKDHTRVGADTSQDIQLFGIGIQPQHCEIDIASDGDVTLTPKENARSCVNGTLVCSTTQLWHGDRILWGNNHFFRINLPK
RKRRDWLKDFEKETGPPEHDLDAASEASSEPDYNYEFAQMEVIMKTLNSNDPVQNVVQVLEKQYLEEKRSALEEQRLMYERELEQLRQQ
LSPDRQPQSSGPDRLAYSSQTAQQKVTQWAEERDELFRQSLAKLREQLVKANTLVREANFLAEEMSKLTDYQVTLQIPAANLSANRKRG
AIVSEPAIQVRRKGKSTQVWTIEKLENKLIDMRDLYQEWKEKVPEAKRLYGKRGDPFYEAQENHNLIGVANVFLECLFCDVKLQYAVPIIS
QQGEVAGRLHVEVMRVTGAVPERVVEDDSSENSSESGSLEVVDSSGEIIHRVKKLTCRVKIKEATGLPLNLSNFVFCQYTFWDQCESTVA
APVVDPEVPSPQSKDAQYTVTFSHCKDYVVNVTEEFLEFISDGALAIEVWGHRCAGNGSSIWEVDSLHAKTRTLHDRWNEVTRRIEMWISI
LELNELGEYAAVELHQAKDVNTGGIFQLRQGHSRRVQVTVKPVQHSGTLPLMVEAILSVSIGCVTARSTKLQRGLDSYQEEDLNCVRERW
SDALIKRREYLDEQIKKVSNKTEKTEDDVEREAQLVEQWVGLTEERNAVLVPAPGSGIPGAPADWIPPPGMETHIPVLFLDLNADDLSANE
QLVGPHASGVNSILPKEHGSQFFYLPIIKHSDDEVSATASWDSSVHDSVHLNRVTPQNERIYLIVKTTVQLSHPAAMELVLRKRIAANIYNK
QSFTQSLKRRISLKNIFYSCGVTYEIVSNIPKATEEIEDRETLALLAARSENEGTSDGETYIEKYTRGVLQVENILSLERLRQAVTVKEALSTK
ARHIRRSLSTPNVHNVSSSRPDLSGFDEDDKGWPENQLDMSDYSSSYQDVACYGTLPRDSPRRNKEGCTSETPHALTVSPFKAFSPQPPKF
FKPLMPVKEEHKKRIALEARPLLSQEDSEEEENELEAINRKLISSQPYVPVEFADFSVYNASLENREWFSSKVDLSNSRVLEKEVSRSPTTSSI
TSGYFSHSASNATLSDMVVPSSDSSDQLAIQTKDADSTEHSTPSLVHDFRPSSNKELTEVEKGLVKDKIIVVPLKENSALAKGSPSSQSIPEK
NSKSLCRTGSCSELDACPSKISQPARGFCPREVTVEHTTNILEDHSFTEFMGVSEGKDFDGLTDSSAGELSSRRSLPNKTGGKTVSDGLHHP
SQLHSKLENDQGGTTSR
>gi|50284696|ref|NP_877434.2| E3 ubiquitin-protein ligase RNF144B [Homo sapiens], SEQ ID NO: 58
MGSAGRLHYLAMTAENPTPGDLAPAPLITCKLCLCEQSLDKMTTLQECQCIFCTACLKQYMQLAIREGCGSPITCPDMVCLNHGTLQEAEI
ACLVPVDQFQLYQRLKFEREVHLDPYRTWCPVADCQTVCPVASSDPGQPVLVECPSCHLKFCSCCKDAWHAEVSCRDSQPIVLPTEHRAL
FGTDAEAPIKQCPVCRVYIERNEGCAQMMCKNCKHTFCWYCLQNLDNDIFLRHYDKGPCRNKLGHSRASVMWNRTQVVGILVGLGIIAL
VTSPLLLLASPCIICCVCKSCRGKKKKHDPSTT
>gi|20149594|ref|NP_031381.2| heat shock protein HSP 90-beta [Homo sapiens], SEQ ID NO: 59
MPEEVHHGEEEVETFAFQAEIAQLMSLIINTFYSNKEIFLRELISNASDALDKIRYESLTDPSKLDSGKELKIDIIPNPQERTLTLVDTGIGMTK
ADLINNLGTIAKSGTKAFMEALQAGADISMIGQFGVGFYSAYLVAEKVVVITKHNDDEQYAWESSAGGSFTVRADHGEPIGRGTKVILHLK
EDQTEYLEERRVKEVVKKHSQFIGYPITLYLEKEREKEISDDEAEEEKGEKEEEDKDDEEKPKIEDVGSDEEDDSGKDKKKKTKKIKEKYID
QEELNKTKPIWTRNFDDITQEEYGEFYKSLTNDWEDHLAVKHFSVEGQLEFRALLFIPRRAPFDLFENKKKKNNIKLYVRRVFIMDSCDELI
PEYLNFIRGVVDSEDLPLNISREMLQQSKILKVIRKNIVKKCLELFSELAEDKENYKKFYEAFSKNLKLGIHEDSTNRRRLSELLRYHTSQSG
DEMTSLSEYVSRMKETQKSIYYITGESKEQVANSAFVERVRKRGFEVVYMTEPIDEYCVQQLKEFDGKSLVSVTKEGLELPEDEEEKKKM
EESKAKFENLCKLMKEILDKKVEKVTISNRLVSSPCCIVTSTYGWTANMERIMKAQALRDNSTMGYMMAKKHLEINPDHPIVETLRQKAE
ADKNDKAVKDLVVLLFETALLSSGFSLEDPQTHSNRIYRMIKLGLGIDEDEVAAEEPNAAVPDEIPPLEGDEDASRMEEVD
>gi|58533161|ref|NP_001011516.1| PDZ and LIM domain protein 5 isoform e [Homo sapiens],
SEQ ID NO: 60
MSNYSVSLVGPAPWGFRLQGGKDFNMPLTISSLKDGGKAAQANVRIGDVVLSIDGINAQGMTHLEAQNKIKGCTGSLNMTLQRASAAPK
PEPVPVQKKTQVTNNPGTVKIPPKRPPRKHIVERYTEFYHVPTHSDASKKRLIEDTEDWRPRTGTTQSRSFRILAQITGTEHLKESEADNTK
KAKEKIPLHVFSPKYTKLRDWHHEVSARALNVQ
>gi|4504023|ref|NP_000815.1| glycine receptor subunit beta isoform A precursor [Homo sapiens],
SEQ ID NO: 61
MKFLLTTAFLILISLWVEEAYSKEKSSKKGKGKKKQYLCPSQQSAEDLARVPANSTSNILNRLLVSYDPRIRPNFKGIPVDVVVNIFINSFGSI
QETTMDYRVNIFLRQKWNDPRLKLPSDFRGSDALTVDPTMYKCLWKPDLFFANEKSANFHDVTQENILLFIFRDGDVLVSMRLSITLSCPL
DLTLFPMDTQRCKMQLESFGYTTDDLRFIWQSGDPVQLEKIALPQFDIKKEDIEYGNCTKYYKGTGYYTCVEVIFTLRRQVGFYMMGVYA
PTLLIVVLSWLSFWINPDASAARVPLGIFSVLSLASECTTLAAELPKVSYVKALDVWLIACLLFGFASLVEYAVVQVMLNNPKRVEAEKARI
AKAEQADGKGGNVAKKNTVNGTGTPVHISTLQVGETRCKKVCTSKSDLRSNDFSIVGSLPRDFELSNYDCYGKPIEVNNGLGKSQAKNN
KKPPPAKPVIPTAAKRIDLYARALFPFCFLFFNVIYWSIYL
>gi|39725952|ref|NP_060516.2| angiogenic factor with G patch and FHA domains 1 [Homo sapiens],
SEQ ID NO: 62
MASEAPSPPRSPPPPTSPEPELAQLRRKVEKLERELRSCKRQVREIEKLLHHTERLYQNAESNNQELRTQVEELSKILQRGRNEDNKKSDVE
VQTENHAPWSISDYFYQTYYNDVSLPNKVTELSDQQDQAIETSILNSKDHLQVENDAYPGTDRTENVKYRQVDHFASNSQEPASALATED
TSLEGSSLAESLRAAAEAAVSQTGFSYDENTGLYFDHSTGFYYDSENQLYYDPSTGIYYYCDVESGRYQFHSRVDLQPYPTSSTKQSKDK
KLKKKRKDPDSSATNEEKDLNSEDQKAFSVEHTSCNEEENFANMKKKAKIGIHHKNSPPKVTVPTSGNTIESPLHENISNSTSFKDEKIMET
DSEPEEGEITDSQTEDSYDEAITSEGNVTAEDSEDEDEDKIWPPCIRVIVIRSPVLQIGSLFIITAVNPATIGREKDMEHTLRIPEVGVSKFHAEI
YFDHDLQSYVLVDQGSQNGTIVNGKQILQPKTKCDPYVLEHGDEVKIGETVLSFHIHPGSDTCDGCEPGQVRAHLRLDKKDESFVGPTLSK
EEKELERRKELKKIRVKYGLQNTEYEDEKTLKNPKYKDRAGKRREQVGSEGTFQRDDAPASVHSEITDSNKGRKMLEKMGWKKGEGLG
KDGGGMKTPIQLQLRRTHAGLGTGKPSSFEDVHLLQNKNKKNWDKARERFTENFPETKPQKDDPGTMPWVKGTLE
>gi|7706318|ref|NP_057113.1| dehydrogenase/reductase SDR family member 7 precursor [Homo sapiens],
SEQ ID NO: 63
MNWELLLWLLVLCALLLLLVQLLRFLRADGDLTLLWAEWQGRRPEWELTDMVVWVTGASSGIGEELAYQLSKLGVSLVLSARRVHELER
VKRRCLENGNLKEKDILVLPLDLTDTGSHEAATKAVLQEFGRIDILVNNGGMSQRSLCMDTSLDVYRKLIELNYLGTVSLTKCVLPHMIER
KQGKIVTVNSILGIISVPLSIGYCASKHALRGFFNGLRTELATYPGIIVSNICPGPVQSNIVENSLAGEVTKTIGNNGDQSHKMTTSRCVRLMLI
SMANDLKEVWISEQPFLLVTYLWQYMPTWAWWITNKMGKKRIENFKSGVDADSSYFKIFKTKHD
>gi|7669526|ref|NP_039258.1| pro-neuregulin-1, membrane-bound isoform isoform HRG-alpha [Homo
sapiens], SEQ ID NO: 64
MSERKEGRGKGKGKKKERGSGKKPESAAGSQSPALPPRLKEMKSQESAAGSKLVLRCETSSEYSSLRFKWFKNGNELNRKNKPQNIKIQK
KPGKSELRINKASLADSGEYMCKVISKLGNDSASANITIVESNEIITGMPASTEGAYVSSESPIRISVSTEGANTSSSTSTSTTGTSHLVKCAEK
EKTFCVNGGECFMVKDLSNPSRYLCKCQPGFTGARCTENVPMKVQNQEKAEELYQKRVLTITGICIALLVVGIMCVVAYCKTKKQRKKL
HDRLRQSLRSERNNMMNIANGPHHPNPPPENVQLVNQYVSKNVISSEHIVEREAETSFSTSHYTSTAHHSTTVTQTPSHSWSNGHTESILSE
SHSVIVMSSVENSRHSSPTGGPRGRLNGTGGPRECNSFLRHARETPDSYRDSPHSERYVSAMTTPARMSPVDFHTPSSPKSPPSEMSPPVSS
MTVSMPSMAVSPFMEEERPLLLVTPPRLREKKFDHHPQQFSSFHHNPAHDSNSLPASPLRIVEDEEYETTQEYEPAQEPVKKLANSRRAKR
TKPNGHIANRLEVDSNTSSQSSNSESETEDERVGEDTPFLGIQNPLAASLEATPAFRLADSRTNPAGRFSTQEEIQARLSSVIANQDPIAV
>gi|27886593|ref|NP_005598.3| focal adhesion kinase 1 isoform b [Homo sapiens], SEQ ID NO: 65
MISADCNLCLPEYDRYLASSKIMAAAYLDPNLNHTPNSSTKTHLGTGMERSPGAMERVLKVFHYFESNSEPTTWASIIRHGDATDVRGIIQ
KIVDSHKVKHVACYGFRLSHLRSEEVHWLHVDMGVSSVREKYELAHPPEEWKYELRIRYLPKGFLNQFTEDKPTLNFFYQQVKSDYMLEI
ADQVDQEIALKLGCLEIRRSYWEMRGNALEKKSNYEVLEKDVGLKRFFPKSLLDSVKAKTLRKLIQQTFRQFANLNREESILKFFEILSPVY
RFDKECFKCALGSSWIISVELAIGPEEGISYLTDKGCNPTHLADFTQVQTIQYSNSEDKDRKGMLQLKIAGAPEPLTVTAPSLTIAENMADLI
DGYCRLVNGTSQSFIIRPQKEGERALPSIPKLANSEKQGMRTHAVSVSETDDYAEIIDEEDTYTMPSTRDYEIQRERIELGRCIGEGQFGDVH
QGIYMSPENPALAVAIKTCKNCTSDSVREKFLQEALTMRQFDHPHIVKLIGVITENPVWIIMELCTLGELRSFLQVRKYSLDLASLILYAYQL
STALAYLESKRFVHRDIAARNVLVSSNDCVKLGDFGLSRYMEDSTYYKASKGKLPIKWMAPESINFRRFTSASDVWMFGVCMWEILMHG
VKPFQGVKNNDVIGRIENGERLPMPPNCPPTLYSLMTKCWAYDPSRRPRFTELKAQLSTILEEEKAQQEERMRMESRRQATVSWDSGGSD
EAPPKPSRPGYPSPRSSEGFYPSPQHMVQTNHYQVSGYPGSHGITAMAGSIYPGQASLLDQTDSWNHRPQEIAMWQPNVEDSTVLDLRGI
GQVLPTHLMEERLIRQQQEMEEDQRWLEKEERFLKPDVRLSRGSIDREDGSLQGPIGNQHIYQPVGKPDPAAPPKKPPRPGAPGHLGSLAS
LSSPADSYNEGVKLQPQEISPPPTANLDRSNDKVYENVTGLVKAVIEMSSKIQPAPPEEYVPMVKEVGLALRTLLATVDETIPLLPASTHREI
EMAQKLLNSDLGELINKMKLAQQYVMTSLQQEYKKQMLTAAHALAVDAKNLLDVIDQARLKMLGQTRPH
>gi|5174764|ref|NP_005944.1| metallothionein-2 [Homo sapiens], SEQ ID NO: 66
MDPNCSCAAGDSCTCAGSCKCKECKCTSCKKSCCSCCPVGCAKCAQGCICKGASDKCSCCA
>gi|198041755|ref|NP_001128250.1| pre-B-cell leukemia transcription factor 3 isoform 2 [Homo
sapiens], SEQ ID NO: 67
MKPALFSVLCEIKEKTGLSIRGAQEEDPPDPQLMRLDNMLLAEGVSGPEKGGGSAAAAAAAAASGGSSDNSIEHSDYRAKLTQIRQIYHTE
LEKYEQACNEFTTHVMNLLREQSRTRPISPKEIERMVGIIHRKFSSIQMQLKQSTCEAVMILRSRFLDARRKRRNFSKQATEILNEYFYSHLS
NPYPSEEAKEELAKKCSITVSQVSNWFGNKRIRYKKNIGKFQEEANLYAAKTAVTAAHAVAAAVQNNQTNSPTTPNSGSSGSFNLPNSGD
MFMNMQSLNGDSYQGSQVGANVQSQVDTLRHVINQTGGYSDGLGGNSLYSPHNLNANGGWQDATTPSSVTSPTEGPGSVHSDTSN
>gi|4557323|ref|NP_000031.1| apolipoprotein C-III precursor [Homo sapiens], SEQ ID NO: 68
MQPRVLLVVALLALLASARASEAEDASLLSFMQGYMKHATKTAKDALSSVQESQVAQQARGWVTDGFSSLKDYWSTVKDKFSEFWDL
DPEVRPTSAVAA
>gi|33342278|ref|NP_079480.2| traB domain-containing protein [Homo sapiens], SEQ ID NO: 69
MDGEEQQPPHEANVEPVVPSEASEPVPRVLSGDPQNLSDVDAFNLLLEMKLKRRRQRPNLPRTVTQLVAEDGSRVYVVGTAHFSDDSKR
DVVKTIREVQPDVVVVELCQYRVSMLKMDESTLLREAQELSLEKLQQAVRQNGLMSGLMQMLLLKVSAHITEQLGMAPGGEFREAFKEA
SKVPFCKFHLGDRPIPVTFKRAIAALSFWQKVRLAWGLCFLSDPISKDDVERCKQKDLLEQMMAEMIGEFPDLHRTIVSERDVYLTYMLRQ
AARRLELPRASDAEPRKCVPSVVVGVVGMGHVPGIEKNWSTDLNIQEIVITVPPPSVSGRVSRLAVKAAFFGLLGYSLYWMGRRTASLVLS
LPAAQYCLQRVTEARHK
>gi|206597477|ref|NP_001128651.1| palmitoyltransferase ZDHHC3 isoform 1 [Homo sapiens],
SEQ ID NO: 70
MMLIPTHHFRNIERKPEYLQPEKCVPPPYPGPVGTMWFIRDGCGIACAIVTWFLVLYAEFVVLFVMLIPSRDYVYSIINGIVFNLLAFLALAS
HCRAMLTDPGAVPKGNATKEFIESLQLKPGQVVYKCPKCCSIKPDRAHHCSVCKRCIRKMDHHCPWVNNCVGENNQKYFVLFTMYIALI
SLHALIMVGFHFLHCFEEDWTKCSSFSPPTTVILLILLCFEGLLFLIFTSVMFGTQVHSICTDETGIEQLKKEERRWAKKTKWMNMKAVFGH
PFSLGWASPFATPDQGKADPYQYVV
>gi|4557791|ref|NP_000425.1| sialidase-1 precursor [Homo sapiens], SEQ ID NO: 71
MTGERPSTALPDRRWGPRILGFWGGCRVWVFAAIFLLLSLAASWSKAENDFGLVQPLVTMEQLLWVSGRQIGSVDTFRIPLITATPRGTLL
AFAEARKMSSSDEGAKFIALRRSMDQGSTWSPTAFIVNDGDVPDGLNLGAVVSDVETGVVFLFYSLCAHKAGCQVASTMLVWSKDDGV
SWSTPRNLSLDIGTEVFAPGPGSGIQKQREPRKGRLIVCGHGTLERDGVFCLLSDDHGASWRYGSGVSGIPYGQPKQENDFNPDECQPYEL
PDGSVVINARNQNNYHCHCRIVLRSYDACDTLRPRDVTFDPELVDPVVAAGAVVTSSGIVFFSNPAHPEFRVNLTLRWSFSNGTSWRKET
VQLWPGPSGYSSLATLEGSMDGEEQAPQLYVLYEKGRNHYTESISVAKISVYGTL
>gi|5453958|ref|NP_006238.1| serine/threonine-protein phosphatase 5 isoform 1 [Homo sapiens],
SEQ ID NO: 72
MAMAEGERTECAEPPRDEPPADGALKRAEELKTQANDYFKAKDYENAIKFYSQAIELNPSNAIYYGNRSLAYLRTECYGYALGDATRAIE
LDKKYIKGYYRRAASNMALGKFRAALRDYETVVKVKPHDKDAKMKYQECNKIVKQKAFERAIAGDEHKRSVVDSLDIESMTIEDEYSGP
KLEDGKVTISFMKELMQWYKDQKKLHRKCAYQILVQVKEVLSKLSTLVETTLKETEKITVCGDTHGQFYDLLNIFELNGLPSETNPYIFNG
DFVDRGSFSVEVILTLFGFKLLYPDHFHLLRGNHETDNMNQIYGFEGEVKAKYTAQMYELFSEVFEWLPLAQCINGKVLIMHGGLFSEDGV
TLDDIRKIERNRQPPDSGPMCDLLWSDPQPQNGRSISKRGVSCQFGPDVTKAFLEENNLDYIIRSHEVKAEGYEVAHGGRCVTVFSAPNYC
DQMGNKASYIHLQGSDLRPQFHQFTAVPHPNVKPMAYANTLLQLGMM
>gi|22212931|ref|NP_631981.2| nucleolar protein 6 gamma isoform [Homo sapiens], SEQ ID NO: 73
MGPAPAGEQLRGATGEPEVMEPALEGTGKEGKKASSRKRTLAEPPAKGLLQPVKLSRAELYKEPTNEELNRLRETEILFHSSLLRLQVEELL
KEVRLSEKKKDRIDAFLREVNQRVVRVPSVPETELTDQAWLPAGVRVPLHQVPYAVKGCFRFLPPAQVTVVGSYLLGTCIRPDINVDVAL
TMPREILQDKDGLNQRYFRKRALYLAHLAHHLAQDPLFGSVCFSYTNGCHLKPSLURPRGKDERLVTVRLHPCPPPDFFRPCRLLPTKNN
VRSAWYRGQSPAGDGSPEPPTPRYNTWVLQDTVLESHLQLLSTILSSAQGLKDGVALLKVWLRQRELDKGQGGFTGFLVSMLVVFLVSTR
KIHTTMSGYQVLRSVLQFLATTDLTVNGISLCLSSDPSLPALADFHQAFSVVFLDSSGHLNLCADVTASTYHQVQHEARLSMMLLDSRADD
GFHLLLMTPKPMIRAFDHVLHLRPLSRLQAACHRLKLWPELQDNGGDYVSAALGPLTTLLEQGLGARLNLLAHSRPPVPEWDISQDPPKH
KDSGTLTLGLLLRPEGLTSVLELGPEADQPEAAKFRQFWGSRSELRRFQDGAIREAVVWEAASMSQKRLIPHQVVTHLLALHADIPETCVH
YVGGPLDALIQGLKEASSTKGRMVMSRGGELVMVPNVEAILEDFAVLGEGLVQTVEARSERWTV
>gi|55770834|ref|NP_057427.3| centromere protein F [Homo sapiens], SEQ ID NO: 74
MSWALEEWKEGLPTRALQKIQELEGQLDKLKKEKQQRQFQLDSLEAALQKQKQKVENEKTEGTNLKRENQRLMEICESLEKTKQKISHEL
QVKESQVNFQEGQLNSGKKQIEKLEQELKRCKSELERSQQAAQSADVSLNPCNTPQKIFTTPLTPSQYYSGSKYEDLKEKYNKEVEERKRL
EAEVKALQAKKASQTLPQATMNHRDIARHQASSSVFSWQQEKTPSHLSSNSQRTPIRRDFSASYFSGEQEVTPSRSTLQIGKRDANSSFFD
NSSSPHLLDQLKAQNQELRNKINELELRLQGHEKEMKGQVNKFQELQLQLEKAKVELIEKEKVLNKCRDELVRTTAQYDQASTKYTALEQ
KLKKLTEDLSCQRQNAESARCSLEQKIKEKEKEFQEELSRQQRSFQTLDQECIQMKARLTQELQQAKNMHNVLQAELDKLTSVKQQLENN
LEEFKQKLCRAEQAFQASQIKENELRRSMEEMKKENNLLKSHSEQKAREVCHLEAELKNIKQCLNQSQNFAEEMKAKNTSQETMLRDLQ
EKINQQENSLTLEKLKLAVADLEKQRDCSQDLLKKREHHIEQLNDKLSKTEKESKALLSALELKKKEYEELKEEKTLFSCWKSENEKLLTQ
MESEKENLQSKINHLETCLKTQQIKSHEYNERVRTLEMDRENLSVEIRNLHNVLDSKSVEVETQKLAYMELQQKAEFSDQKHQKEIENMC
LKTSQLTGQVEDLEHKLQLLSNEIMDKDRCYQDLHAEYESLRDLLKSKDASLVTNEDHQRSLLAFDQQPAMHHSFANIIGEQGSMPSERSE
CRLEADQSPKNSAILQNRVDSLEFSLESQKQMNSDLQKQCEELVQIKGEIEENLMKAEQMHQSFVAETSQRISKLQEDTSAHQNVVAETLS
ALENKEKELQLLNDKVETEQAEIQELKKSNHLLEDSLKELQLLSETLSLEKKEMSSIISLNKREIEELTQENGTLKEINASLNQEKMNLIQKSE
SFANYIDEREKSISELSDQYKQEKLILLQRCEETGNAYEDLSQKYKAAQEKNSKLECLLNECTSLCENRKNELEQLKEAFAKEHQEFLTKLA
FAEERNQNLMLELETVQQALRSEMTDNQNNSKSEAGGLKQEIMTLKEEQNKMQKEVNDLLQENEQLMKVMKTKHECQNLESEPIRNSV
KERESERNQCNFKPQMDLEVKEISLDSYNAQLVQLEAMLRNKELKLQESEKEKECLQHELQTIRGDLETSNLQDMQSQEISGLKDCEIDAE
EKYISGPHELSTSQNDNAHLQCSLQTTMNKLNELEKICEILQAEKYELVTELNDSRSECITATRKMAEEVGKLLNEVKILNDDSGLLHGELV
EDIPGGEFGEQPNEQHPVSLAPLDESNSYEHLTLSDKEVQMHFAELQEKFLSLQSEHKILHDQHCQMSSKMSELQTYVDSLKAENLVLSTN
LRNFQGDLVKEMQLGLEEGLVPSLSSSCVPDSSSLSSLGDSSFYRALLEQTGDMSLLSNLEGAVSANQCSVDEVFCSSLQEENLTRKETPSA
PAKGVEELESLCEVYRQSLEKLEEKMESQGIMKNKEIQELEQLLSSERQELDCLRKQYLSENEQWQQKLTSVTLEMESKLAAEKKQTEQLS
LELEVARLQLQGLDLSSRSLLGIDTEDAIQGRNESCDISKEHTSETTERTPKHDVHQICDKDAQQDLNLDIEKITETGAVKPTGECSGEQSPD
TNYEPPGEDKTQGSSECISELSFSGPNALVPMDFLGNQEDIHNLQLRVKETSNENLRLLHVIEDRDRKVESLLNEMKELDSKLHLQEVQLM
TKIEACIELEKIVGELKKENSDLSEKLEYFSCDHQELLQRVETSEGLNSDLEMHADKSSREDIGDNVAKVNDSWKERFLDVENELSRIRSEK
ASIEHEALYLEADLEVVQTEKLCLEKDNENKQKVIVCLEEELSVVTSERNQLRGELDTMSKKTTALDQLSEKMKEKTQELESHQSECLHCI
QVAEAEVKEKTELLQTLSSDVSELLKDKTHLQEKLQSLEKDSQALSLTKCELENQIAQLNKEKELLVKESESLQARLSESDYEKLNVSKALE
AALVEKGEFALRLSSTQEEVHQLRRGIEKLRVRIEADEKKQLHIAEKLKERERENDSLKDKVENLERELQMSEENQELVILDAENSKAEVET
LKTQIEEMARSLKVFELDLVTLRSEKENLTKQIQEKQGQLSELDKLLSSFKSLLEEKEQAEIQIKEESKTAVEMLQNQLKELNEAVAALCGD
QEIMKATEQSLDPPIEEEHQLRNSIEKLRARLEADEKKQLCVLQQLKESEHHADLLKGRVENLERELEIARTNQEHAALEAENSKGEVETLK
AKIEGMTQSLRGLELDVVTIRSEKENLTNELQKEQERISELEIINSSFENILQEKEQEKVQMKEKSSTAMEMLQTQLKELNERVAALHNDQE
ACKAKEQNLSSQVECLELEKAQLLQGLDEAKNNYIVLQSSVNGLIQEVEDGKQKLEKKDEEISRLKNQIQDQEQLVSKLSQVEGEHQLWK
EQNLELRNLTVELEQKIQVLQSKNASLQDTLEVLQSSYKNLENELELTKMDKMSFVEKVNKMTAKETELQREMHEMAQKTAELQEELSG
EKNRLAGELQLLLEEIKSSKDQLKELTLENSELKKSLDCMHKDQVEKEGKVREEIAEYQLRLHEAEKKHQALLLDTNKQYEVEIQTYREKL
TSKEECLSSQKLEIDLLKSSKEELNNSLKATTQILEELKKTKMDNLKYVNQLKKENERAQGKMKLLIKSCKQLEEEKEILQKELSQLQAAQE
KQKTGTVMDTKVDELTTEIKELKETLEEKTKEADEYLDKYCSLLISHEKLEKAKEMLETQVAHLCSQQSKQDSRGSPLLGPVVPGPSPIPSV
TEKRLSSGQNKASGKRQRSSGIWENGRGPTPATPESFSKKSKKAVMSGIHPAEDTEGTEFEPEGLPEVVKKGFADIPTGKTSPYILRRTTMA
TRTSPRLAAQKLALSPLSLGKENLAESSKPTAGGSRSQKVKVAQRSPVDSGTILREPTTKSVPVNNLPERSPTDSPREGLRVKRGRLVPSPK
AGLESNGSENCKVQ
>gi|25014088|ref|NP_543153.1| sodium-dependent phosphate transport protein 2C [Homo sapiens],
SEQ ID NO: 75
MPSSLPGSQVPHPTLDAVDLVEKTLRNEGTSSSAPVLEEGDTDPWTLPQLKDTSQPWKELRVAGRLRRVAGSVLKACGLLGSLYFFICSLD
VLSSAFQLLGSKVAGDIFKDNVVLSNPVAGLVIGVLVTALVQSSSTSSSIVVSMVAAKLLTVRVSVPIIMGVNVGTSITSTLVSMAQSGDREF
QRAFSGSAVHGIFNWLTVLVLLPLESATALLERLSELALGAASLTPRAQAPDILKVLTKPLTHLIVQLDSDMIMSSATGNATNSSLIKHWCGT
TGQPTQENSSCGAFGPCTEKNSTAPADRLPCRHLFAGTELTDLAVGCILLAGSLLVLCGCLVLIVKLLNSVLRGRVAQVVRTVINADFPFPL
GWLGGYLAVLAGAGLTFALQSSSVFTAAVVPLMGVGVISLDRAYPLLLGSNIGTTTTALLAALASPADRMLSALQVALIHFFFNLAGILLW
YLVPALRLPIPLARHFGVVTARYRWVAGVYLLLGFLLLPLAAFGLSLAGGMVLAAVGGPLVGLVLLVILVTVLQRRRPAWLPVRLRSWAW
LPVWLHSLEPWDRLVTRCCPCNVCSPPKATTKEAYCYENPEILASQQL
>gi|4557735|ref|NP_000231.1| amine oxidase [flavin-containing] A [Homo sapiens], SEQ ID NO: 76
MENQEKASIAGHMFDVVVIGGGISGLSAAKLLTEYGVSVLVLEARDRVGGRTYTIRNEHVDYVDVGGAYVGPTQNRILRLSKELGIETYK
VNVSERLVQYVKGKTYPFRGAFPPVWNPIAYLDYNNLWRTIDNMGKEIPTDAPWEAQHADKWDKMTMKELIDKICWTKTARRFAYLFV
NINVTSEPHEVSALWFLWYVKQCGGTTRIFSVTNGGQERKFVGGSGQVSERIMDLLGDQVKLNHPVTHVDQSSDNIIIETLNHEHYECKYV
INAIPPTLTAKIFIFRPELPAERNQLIQRLPMGAVIKCMMYYKEAFWKKKDYCGCMIIEDEDAPISITLDDTKPDGSLPAIMGFILARKADRLA
KLHKEIRKKKICELYAKVLGSQEALHPVHYEEKNWCEEQYSGGCYTAYFPPGIMTQYGRVIRQPVGRIFFAGTETATKWSGYMEGAVEAG
ERAAREVLNGLGKVTEKDIWVQEPESKDVPAVEITHTFWERNLPSVSGLLKIIGFSTSVTALGFVLYKYKLLPRS
>gi|22547186|ref|NP_004160.3| serine hydroxymethyltransferase, cytosolic isoform 1 [Homo sapiens],
SEQ ID NO: 77
MTMPVNGAHKDADLWSSHDKMLAQPLKDSDVEVYNIIKKESNRQRVGLELIASENFASRAVLEALGSCLNNKYSEGYPGQRYYGGTEFI
DELETLCQKRALQAYKLDPQCWGVNVQPYSGSPANFAVYTALVEPHGRIMGLDLPDGGHLTHGFMTDKKKISATSIFFESMPYKVNPDT
GYINYDQLEENARLFHPKLIIAGTSCYSRNLEYARLRKIADENGAYLMADMAHISGLVAAGVVPSPFEHCHVVTTTTHKTLRGCRAGMIFY
RKGVKSVDPKTGKEILYNLESLINSAVFPGLQGGPHNHAIAGVAVALKQAMTLEFKVYQHQVVANCRALSEALTELGYKIVTGGSDNHLIL
VDLRSKGTDGGRAEKVLEACSIACNKNTCPGDRSALRPSGLRLGTPALTSRGLLEKDFQKVAHFIHRGIELTLQIQSDTGVRATLKEFKERL
AGDKYQAAVQALREEVESFASLFPLPGLPDF
>gi|30581109|ref|NP_848695.1| minor histocompatibility antigen H13 isoform 2 [Homo sapiens],
SEQ ID NO: 78
MDSALSDPHNGSAEAGGPTNSTTRPPSTPEGIALAYGSLLLMALLPIFFGALRSVRCARGKNASDMPETITSRDAARFPIIASCTLLGLYLFFK
IFSQEYINLLLSMYFFVLGILALSHTISPFMNKFFPASFPNRQYQLLFTQGSGENKEEIINYEFDTKDLVCLGLSSIVGVWYLLRKHWIANNLF
GLAFSLNGVELLHLNNVSTGCILLGGLFIYDVFWVFGTNVMVTVAKSFEAPIKLVFPQDLLEKGLEANNFAMLGLGDVVIPGIFIALLLRFDI
SLKKNTHTYFYTSFAAYIFGLGLTIFIMHIFKHAQPALLYLVPACIGFPVLVALAKGEVTEMFSYESSAEILPHTPRLTHFPTVSGSPASLADS
MQQKLAGPRRRRPQNPSAM
>gi|21312134|ref|NP_056973.2| mediator of RNA polymerase II transcription subunit 15 isoform b
[Homo sapiens], SEQ ID NO: 79
MDVSGQETDWRSTAFRQKLVSQIEDAMRKAGVAHSKSSKDMESHVFLKAKTRDEYLSLVARLIIHFRDIHNKKSQASVSDPMNALQSLT
GGPAAGAAGIGMPPRGPGQSLGGMGSLGAMGQPMSLSGQPPPGTSGMAPHSMAVVSTATPQTQLQLQQVALQQQQQQQQFQQQQQAA
LQQQQQQQQQQQFQAQQSAMQQQFQAVVQQQQQLQQQQQQQQHLIKLHHQNQQQIQQQQQQLQRIAQLQLQQQQQQQQQQQQQQQ
QALQAQPPIQQPPMQQPQPPPSQALPQQLQQMHHTQHHQPPPQPQQPPVAQNQPSQLPPQSQTQPLVSQAQALPGQMLYTQPPLKFVRAP
MVVQQPPVQPQVQQQQTAVQTAQAAQMVAPGVQVSQSSLPMLSSPSPGQQVQTPQSMPPPPQPSPQPGQPSSQPNSNVSSGPAPSPSSFL
PSPSPQPSQSPVTARTPQNFSVPSPGPLNTPVNPSSVMSPAGSSQAEEQQYLDKLKQLSKYIEPLRRMINKIDKNEDRKKDLSKMKSLLDILT
DPSKRCPLKTLQKCEIALEKLKNDMAVPTPPPPPVPPTKQQYLCQPLLDAVLANIRSPVFNHSLYRTFVPAMTAIHGPPITAPVVCTRKRRLE
DDERQSIPSVLQGEVARLDPKFLVNLDPSHCSNNGTVHLICKLDDKDLPSVPPLELSVPADYPAQSPLWIDRQWQYDANPFLQSVHRCMTS
RLLQLPDKHSVTALLNTWAQSVHQACLSAA
>gi|13129110|ref|NP_077007.1| methylosome protein 50 [Homo sapiens], SEQ ID NO: 80
MRKETPPPLVPPAAREWNLPPNAPACMERQLEAARYRSDGALLLGASSLSGRCWAGSLWLFKDPCAAPNEGFCSAGVQTEAGVADLTW
VGERGILVASDSGAVELWELDENETLIVSKFCKYEHDDIVSTVSVLSSGTQAVSGSKDICIKVWDLAQQVVLSSYRAHAAQVTCVAASPHK
DSVFLSCSEDNRILLWDTRCPKPASQIGCSAPGYLPTSLAWHPQQSEVFVFGDENGTVSLVDTKSTSCVLSSAVHSQCVTGLVFSPHSVPFL
ASLSEDCSLAVLDSSLSELFRSQAHRDFVRDATWSPLNHSLLTTVGWDHQVVHHVVPTEPLPAPGPASVTE
>gi|9910280|ref|NP_064505.1| UDP-glucose:glycoprotein glucosyltransferase 1 precursor [Homo
sapiens], SEQ ID NO: 81
MGCKGDASGACAAGALPVTGVCYKMGVLVVLTVLWLFSSVKADSKAITTSLTTKWFSTPLLLEASEFLAEDSQEKFWNFVEASQNIGSSD
HDGTDYSYYHAILEAAFQFLSPLQQNLFKFCLSLRSYSATIQAFQQIAADEPPPEGCNSFFSVHGKKTCESDTLEALLLTASERPKPLLFKGD
HRYPSSNPESPVVIFYSEIGSEEFSNFHRQLISKSNAGKINYVFRHYIFNPRKEPVYLSGYGVELAIKSTEYKAKDDTQVKGTEVNTTVIGEN
DPIDEVQGFLFGKLRDLHPDLEGQLKELRKHLVESTNEMAPLKVWQLQDLSFQTAARILASPVELALVVMKDLSQNFPTKARAITKTAVSS
ELRTEVEENQKYFKGTLGLQPGDSALFINGLHMDLDTQDIFSLFDVLRNEARVMEGLHRLGIEGLSLHNVLKLNIQPSEADYAVDIRSPAIS
WVNNLEVDSRYNSWPSSLQELLRPTFPGVIRQIRKNLHNMVFIVDPAHETTAELMNTAEMFLSNHIPLRIGFIFVVNDSEDVDGMQDAGVA
VLRAYNYVAQEVDDYHAFQTLTHIYNKVRTGEKVKVEHVVSVLEKKYPYVEVNSILGIDSAYDRNRKEARGYYEQTGVGPLPVVLFNG
MPFEREQLDPDELETITMHKILETTTFFQRAVYLGELPHDQDVVEYIMNQPNVVPRINSRILTAERDYLDLTASNNFFVDDYARFTILDSQG
KTAAVANSMNYLTKKGMSSKEIYDDSFIRPVTFWIVGDFDSPSGRQLLYDAIKHQKSSNNVRISMINNPAKEISYENTQISRAIWAALQTQT
SNAAKNFITKMAKEGAAEALAAGADIAEFSVGGMDFSLFKEVFESSKMDFILSHAVYCRDVLKLKKGQRAVISNGRIIGPLEDSELFN
QDDFHLLENIILKTSGQKIKSHIQQLRVEEDVASDLVMKVDALLSAQPKGDPRIEYQFFEDRHSAIKLRPKEGETYFDVVAVVDPVTREAQR
LAPLLLVLAQLINMNLRVFMNCQSKLSDMPLKSFYRYVLEPEISFTSDNSFAKGPIAKFLDMPQSPLFTLNLNTPESWMVESVRTPYDLDNI
YLEEVDSVVAAEYELEYLLLEGHCYDITTGQPPRGLQFTLGTSANPVIVDTIVMANLGYFQLKANPGAWILRLRKGRSEDIYRIYSHDGTDS
PPDADEVVIVLNNFKSKIIKVKVQKKADMVNEDLLSDGTSENESGFWDSFKWGFTGQKTEEVKQDKDDIINIFSVASGHLYERFLRIMMLS
VLKNTKTPVKFWFLKNYLSPTFKEFIPYMANEYNFQYELVQYKWPRWLHQQTEKQRIIWGYKILFLDVLFPLVVDKFLFVDADQIVRTDL
KELRDFNLDGAPYGYTPFCDSRREMDGYRFWKSGYWASHLAGRKYHISALYVVDLKKFRKIAAGDRLRGQYQGLSQDPNSLSNLDQDL
PNNMIHQVPIKSLPQEWLWCETWCDDASKKRAKTIDLCNNPMTKEPKLEAAVRIVPEWQDYDQEIKQLQIRFQKEKETGALYKEKTKEPS
REGPQKREEL
>gi|49574546|ref|NP_001001890.1| runt-related transcription factor 1 isoform AML1b [Homo sapiens],
SEQ ID NO: 82
MRIPVDASTSRRFTPPSTALSPGKMSEALPLGAPDAGAALAGKLRSGDRSMVEVLADHPGELVRTDSPNFLCSVLPTHWRCNKTLPIAFKV
VALGDVPDGTLVTVMAGNDENYSAELRNATAAMKNQVARFNDLRFVGRSGRGKSFTLTITVFTNPPQVATYHRAIKITVDGPREPRRHR
QKLDDQTKPGSLSFSERLSELEQLRRTAMRVSPHHPAPTPNPRASLNHSTAFNPQPQSQMQDTRQIQPSPPWSYDQSYQYLGSIASPSVHP
ATPISPGRASGMTTLSAELSSRLSTAPDLTAFSDPRQFPALPSISDPRMHYPGAFTYSPTPVTSGIGIGMSAMGSATRYHTYLPPPYPGSSQA
QGGPFQASSPSYHLYYGASAGSYQFSMVGGERSPPRILPPCTNASTGSALLNPSLPNQSDVVEAEGSHSNSPTNMAPSARLEEAVWRPY
>gi|27886593|ref|NP_005598.3| focal adhesion kinase 1 isoform b [Homo sapiens], SEQ ID NO: 83
MISADCNLCLPEYDRYLASSKIMAAAYLDPNLNHTPNSSTKTHLGTGMERSPGAMERVLKVFHYFESNSEPTTWASIIRHGDATDVRGIIQ
KIVDSHKVKHVACYGFRLSHLRSEEVHWLHVDMGVSSVREKYELAHPPEEWKYELRIRYLPKGFLNQFTEDKPTLNFFYQQVKSDYMLEI
ADQVDQEIALKLGCLEIRRSYWEMRGNALEKKSNYEVLEKDVGLKRFFPKSLLDSVKAKTLRKLIQQTFRQFANLNREESILKFFEILSPVY
RFDKECFKCALGSSWIISVELAIGPEEGISYLTDKGCNPTHLADFTQVQTIQYSNSEDKDRKGMLQLKIAGAPEPLTVTAPSLTIAENMADLI
DGYCRLVNGTSQSFIIRPQKEGERALPSIPKLANSEKQGMRTHAVSVSETDDYAEIIDEEDTYTMPSTRDYEIQRERIELGRCIGEGQFGDVH
QGIYMSPENPALAVAIKTCKNCTSDSVREKFLQEALTMRQFDHPHIVKLIGVITENPVWIIMELCTLGELRSFLQVRKYSLDLASLILYAYQL
STALAYLESKRFVHRDIAARNVLVSSNDCVKLGDFGLSRYMEDSTYYKASKGKLPIKWMAPESINFRRFTSASDVWMFGVCMWEILMHG
VKPFQGVKNNDVIGRIENGERLPMPPNCPPTLYSLMTKCWAYDPSRRPRFTELKAQLSTILEEEKAQQEERMRMESRRQATVSWDSGGSD
EAPPKPSRPGYPSPRSSEGFYPSPQHMVQTNHYQVSGYPGSHGITAMAGSIYPGQASLLDQTDSWNHRPQEIAMWQPNVEDSTVLDLRGI
GQVLPTHLMEERLIRQQQEMEEDQRWLEKEERFLKPDVRLSRGSIDREDGSLQGPIGNQHIYQPVGKPDPAAPPKKPPRPGAPGHLGSLAS
LSSPADSYNEGVKLQPQEISPPPTANLDRSNDKVYENVTGLVKAVIEMSSKIQPAPPEEYVPMVKEVGLALRTLLATVDETIPLLPASTHREI
EMAQKLLNSDLGELINKMKLAQQYVMTSLQQEYKKQMLTAAHALAVDAKNLLDVIDQARLKMLGQTRPH
>gi|56118221|ref|NP_061916.3| amyloid beta A4 precursor protein-binding family B member 1-
interacting protein [Homo sapiens], SEQ ID NO: 84
MGESSEDIDQMFSTLLGEMDLLTQSLGVDTLPPPDPNPPRAEFNYSVGFKDLNESLNALEDQDLDALMADLVADISEAEQRTIQAQKESLQ
NQHHSASLQASIFSGAASLGYGTNVAATGISQYEDDLPPPPADPVLDLPLPPPPPEPLSQEEEEAQAKADKIKLALEKLKEAKVKKLVVKVH
MNDNSTKSLMVDERQLARDVLDNLFEKTHCDCNVDWCLYEIYPELQIERFFEDHENVVEVLSDWTRDTENKILFLEKEEKYAVFKNPQNF
YLDNRGKKESKETNEKMNAKNKESLLEESFCGTSIIVPELEGALYLKEDGKKSWKRRYFLLRASGIYYVPKGKTKTSRDLACFIQFENVNIY
YGTQHKMKYKAPTDYCFVLKHPQIQKESQYIKYLCCDDTRTLNQWVMGIRIAKYGKTLYDNYQRAVAKAGLASRWTNLGTVNAAAPA
QPSTGPKTGTTQPNGQIPQATHSVSAVLQEAQRHAETSKDKKPALGNHHDPAVPRAPHAPKSSLPPPPPVRRSSDTSGSPATPLKAKGTGG
GGLPAPPDDFLPPPPPPPPLDDPELPPPPPDFMEPPPDFVPPPPPSYAGIAGSELPPPPPPPPAPAPAPVPDSARPPPAVAKRPPVPPKRQENPG
HPGGAGGGEQDFMSDLMKALQKKRGNVS
>gi|11386139|ref|NP_000923.1| 1-phosphatidylinositol-4,5-bisphosphate phosphodiesterase beta-3
isoform 1 [Homo sapiens], SEQ ID NO: 85
MAGAQPGVHALQLEPPTVVETLRRGSKFIKWDEETSSRNLVTLRVDPNGFFLYWTGPNMEVDTLDISSIRDTRTGRYARLPKDPKIREVLG
FGGPDARLEEKLMTVVSGPDPVNTVFLNFMAVQDDTAKVWSEELFKLAMNILAQNASRNTFLRKAYTKLKLQVNQDGRIPVKNILKMFS
ADKKRVETALESCGLKFNRSESIRPDEFSLEIFERFLNKLCLRPDIDKILLEIGAKGKPYLTLEQLMDFINQKQRDPRLNEVLYPPLRPSQARL
LIEKYEPNQQFLERDQMSMEGFSRYLGGEENGILPLEALDLSTDMTQPLSAYFINSSHNTYLTAGQLAGTSSVEMYRQALLWGCRCVELD
VWKGRPPEEEPFITHGFTMTTEVPLRDVLEAIAETAFKTSPYPVILSFENHVDSAKQQAKMAEYCRSIFGDALLIEPLDKYPLAPGVPLPSPQ
DLMGRILVKNKKRHRPSAGGPDSAGRKRPLEQSNSALSESSAATEPSSPQLGSPSSDSCPGLSNGEEVGLEKPSLEPQKSLGDEGLNRGPYV
LGPADREDEEEDEEEEEQTDPKKPTTDEGTASSEVNATEEMSTLVNYIEPVKFKSFEAARKRNKCFEMSSFVETKAMEQLTKSPMEFVEY
NKQQLSRIYPKGTRVDSSNYMPQLFWNVGCQLVALNFQTLDVAMQLNAGVFEYNGRSGYLLKPEFMRRPDKSFDPFTEVIVDGIVANAL
RVKVISGQFLSDRKVGIYVEVDMFGLPVDTRRKYRTRTSQGNSFNPVWDEEPFDFPKVVLPTLASLRIAAFEEGGKFVGHRILPVSAIRSGY
HYVCLRNEANQPLCLPALLIYTEASDYIPDDHQDYAEALINPIKHVSLMDQRARQLAALIGESEAQAGQETCQDTQSQQLGSQPSSNPTPSP
LDASPRRPPGPTTSPASTSLSSPGQRDDLIASILSEVAPTPLDELRGHKALVKLRSRQERDLRELRKKHQRKAVTLTRRLLDGLAQAQAEGR
CRLRPGALGGAADVEDTKEGEDEAKRYQEFQNRQVQSLLELREAQVDAEAQRRLEHLRQALQRLREVVLDANTTQFKRLKEMNEREKK
ELQKILDRKRHNSISEAKMRDKHKKEAELTEINRRHITESVNSIRRLEEAQKQRHDRLVAGQQQVLQQLAEEEPKLLAQLAQECQEQRARL
PQEIRRSLLGEMPEGLGDGPLVACASNGHAPGSSGHLSGADSESQEENTQL
>gi|16445029|ref|NP_443100.1| immunoglobulin supelfamily member 8 [Homo sapiens], SEQ ID NO: 86
MGALRPTLLPPSLPLLLLLMLGMGCWAREVLVPEGPLYRVAGTAVSISCNVTGYEGPAQQNFEWFLYRPEAPDTALGIVSTKDTQFSYAVF
KSRVVAGEVQVQRLQGDAVVLKIARLQAQDAGIYECHTPSTDTRYLGSYSGKVELRVLPDVLQVSAAPPGPRGRQAPTSPPRMTVHEGQ
ELALGCLARTSTQKHTHLAVSFGRSVPEAPVGRSTLQEVVGIRSDLAVEAGAPYAERLAAGELRLGKEGTDRYRMVVGGAQAGDAGTYH
CTAAEWIQDPDGSWAQIAEKRAVLAHVDVQTLSSQLAVTVGPGERRIGPGEPLELLCNVSGALPPAGRHAAYSVGWEMAPAGAPGPGRL
VAQLDTEGVGSLGPGYEGRHIAMEKVASRTYRLRLEAARPGDAGTYRCLAKAYVRGSGTRLREAASARSRPLPVHVREEGVVLEAVAWL
AGGTVYRGETASLLCNISVRGGPPGLRLAASWWVERPEDGELSSVPAQLVGGVGQDGVAELGVRPGGGPVSVELVGPRSHRLRLHSLGPE
DEGVYHCAPSAWVQHADYSWYQAGSARSGPVTVYPYMHALDTLFVPLLVGTGVALVTGATVLGTITCCFMKRLRKR
>gi|209413763|ref|NP_001129247.1| calcium channel flower homolog isoform b [Homo sapiens],
SEQ ID NO: 87
MSSSGGAPGASASSAPPAQEEGMTWWYRWLCRLSGVLGAVSCATSGLFNCITIHPLNIAAGVWMMMAVVPIVISLTLTTLLGNAIAFATGV
LYGLSALGKKGDAISYARIQQQRQQADEEKLAETLEGEL
>gi|11968003|ref|NP_071906.1| 5-azacytidine-induced protein 2 isoform a [Homo sapiens],
SEQ ID NO: 88
MDALVEDDICILNHEKAHKRDTVTPVSIYSGDESVASHFALVTAYEDIKKRLKDSEKENSLLKKRIRFLEEKLIARFEEETSSVGREQVNKA
YHAYREVCIDRDNLKSKLDKMNKDNSESLKVLNEQLQSKEVELLQLRTEVETQQVMRNLNPPSSNWEVEKLSCDLKIHGLEQELELMRK
ECSDLKIELQKAKQTDPYQEDNLKSRDLQKLSISSDNMQHAYWELKREMSNLHLVTQVQAELLRKLKTSTAIKKACAPVGCSEDLGRDST
KLHLMNFTATYTRHPPLLPNGKALCHTTSSPLPGDVKVLSEKAILQSWTDNERSIPNDGTCFQEHSSYGRNSLEDNSWVFPSPPKSSETAFG
ETKTKTLPLPNLPPLHYLDQHNQNCLYKN
>gi|89111122|ref|NP_001034750.1| toll/interleukin-1 receptor domain-containing adapter protein
isoform a [Homo sapiens], SEQ ID NO: 89
MASSTSLPAPGSRPKKPLGKMADWFRQTLLKKPKKRPNSPESTSSDASQPTSQDSPLPPSLSSVTSPSLPPTHASDSGSSRWSKDYDVCVCH
SEEDLVAAQDLVSYLEGSTASLRCFLQLRDATPGGAIVSELCQALSSSHCRVLLITPGFLQDPWCKYQMLQALTEAPGAEGCTIPLLSGLSR
AAYPPELRFMYYVDGRGPDGGFRQVKEAVMRYLQTLS
>gi|172072620|ref|NP_055047.2| vesicle-associated membrane protein 2 [Homo sapiens], SEQ ID NO: 90
MSATAATAPPAAPAGEGGPPAPPPNLTSNRRLQQTQAQVDEVVDIMRVNVDKVLERDQKLSELDDRADALQAGASQFETSAAKLKRKY
WWKNLKMMELGVICABLIIIIVYFST
>gi|10835147|ref|NP_000568.1| interleukin-1 receptor antagonist protein isoform 3 [Homo sapiens],
SEQ ID NO: 91
MALETICRPSGRKSSKMQAFRIWDVNQKTFYLRNNQLVAGYLQGPNVNLEEKIDVVPIEPHALFLGIHGGKMCLSCVKSGDETRLQLEAV
NITDLSENRKQDKRFAFIRSDSGPTTSFESAACPGWFLCTAMEADQPVSLTNMPDEGVMVTKFYFQEDE
>gi|19743850|ref|NP_598012.1| decorin isoform c precursor [Homo sapiens], SEQ ID NO: 92
MKATIILLLLAQVSWAGPFQQRGLFDFMLEDEASGIGPEVPDDRDFEPSLGPVCPFRCQCHLRVVQCSDLGLPPSLTELHLDGNKISRVDAA
SLKGLNNLAKLGLSFNSISAVDNGSLANTPHLRELHLDNNKLTRVPGGLAEHKYIQVVYLHNNNISVVGSSDFCPPGHNTKKASYSGVSLF
SNPVQYWEIQPSTFRCVYVRSAIQLGNYK
>gi|289666732|ref|NP_001166237.1| forkhead box protein P2 isoform V [Homo sapiens], SEQ ID NO: 93
MMQESATETISNSSMNQNGMSTLSSQLDAGSRDGRSSGDTSSEVSTVELLHLQQQQALQAARQLLLQQQTSGLKSPKSSDKQRPLQVPVS
VAMMTPQVITPQQMQQILQQQVLSPQQLQALLQQQQAVMLQQQQLQEFYKKQQEQLHLQLLQQQQQQQQQQQQQQQQQQQQQQQQ
QQQQQQQQQQQQQQQQHPGKQAKEQQQQQQQQQLAAQQLVFQQQLLQMQQLQQQQHLLSLQRQGLISIPPGQAALPVQSLPQAGLSP
AEIQQLWKEVTGVHSMEDNGIKHGGLDLTTNNSSSTTSSNTSKASPPITHHSIVNGQSSVLSARRDSSSHEETGASHTLYGHGVCKWPGCE
SICEDFGQFLKHLNNEHALDDRSTAQCRVQMQVVQQLEIQLSKERERLQAMMTHLHMRPSEPKPSPKPLNLVSSVTMSKNMLETSPQSLP
QTPTTPTAPVTPITQGPSVITPASVPNVGAIRRRHSDKYNIPMSSEIAPNYEFYKNADVRPPFTYATLIRQAIMESSDRQLTLNEIYSWFTRTF
AYFRRNAATWKNAVRHNLSLHKCFVRVENVKGAVWTVDEVEYQKRRSQKITGSPTLVKNIPTSLGYGAALNASLQAALAESSLPLLSNP
GLINNASSGLLQAVHEDLNGSLDHIDSNGNSSPGCSPQPHIHSIHVKEEPVIAEDEDCPMSLVTTANHSPELEDDREIEEEPLSEDLE
>gi|4502337|ref|NP_001176.1| zinc-alpha-2-glycoprotein precursor [Homo sapiens], SEQ ID NO: 94
MVRMVPVLLSLLLLLGPAVPQENQDGRYSLTYIYTGLSKHVEDVPAFQALGSLNDLQFFRYNSKDRKSQPMGLWRQVEGMEDWKQDSQ
LQKAREDIFMETLKDIVEYYNDSNGSHVLQGRFGCEIENNRSSGAFWKYYYDGKDYIEFNKEIPAWVPFDPAAQITKQKWEAEPVYVQRA
KAYLEEECPATLRKYLKYSKNILDRQDPPSVVVTSHQAPGEKKKLKCLAYDFYPGKIDVHWTRAGEVQEPELRGDVLHNGNGTYQSWV
VVAVPPQDTAPYSCHVQHSSLAQPLVVPWEAS
>gi|295986608|ref|NP_001171597.1| immunoglobulin lambda-like polypeptide 5 [Homo sapiens],
SEQ ID NO: 95
MRPKTGQVGCETPEELGPGPRQRWPLLLLGLAMVAHGLLRPMVAPQSGDPDPGASVGSSRSSLRSLWGRLLLQPSPQRADPRCWPRGFW
SEPQSLCYVFGTGTKVTVLGQPKANPTVTLFPPSSEELQANKATLVCLISDFYPGAVTVAWKADGSPVKAGVETTKPSKQSNNKYAASSY
LSLTPEQWKSHRSYSCQVTHEGSTVEKTVAPTECS
>gi|13236530|ref|NP_077278.1| matrix metalloproteinase-28 isoform 1 preproprotein [Homo sapiens],
SEQ ID NO: 96
MVARVGLLLRALQLLLWGHLDAQPAERGGQELRKEAEAFLEKYGYLNEQVPKAPTSTRFSDAIRAFQWVSQLPVSGVLDRATLRQMTRP
RCGVTDTNSYAAWAERISDLFARHRTKMRRKKRFAKQGNKWYKQHLSYRLVNWPEHLPEPAVRGAVRAAFQLWSNVSALEFWEAPAT
GPADIRLTFFQGDHNDGLGNAFDGPGGALAHAFLPRRGEAHFDQDERWSLSRRRGRNLFVVLAHEIGHTLGLTHSPAPRALMAPYYKRLG
RDALLSWDDVLAVQSLYGKPLGGSVAVQLPGKLFTDFETWDSYSPQGRRPETQGPKYCHSSFDAITVDRQQQLYIFKGSHFWEVAADGN
VSEPRPLQERWVGLPPNIEAAAVSLNDGDFYFFKGGRCWRFRGPKPVWGLPQLCRAGGLPRHPDAALFFPPLRRLILFKGARYYVLARGG
LQVEPYYPRSLQDWGGIPEEVSGALPRPDGSIIFFRDDRYWRLDQAKLQATTSGRWATELPWMGCWHANSGSALF
>gi|44662834|ref|NP_004235.3| scavenger receptor cysteine-rich type 1 protein M130 isoform a
[Homo sapiens], SEQ ID NO: 97
MSKLRMVLLEDSGSADFRRHFVNLSPFTITVVLLLSACFVTSSLGGTDKELRLVDGENKCSGRVEVKVQEEWGTVCNNGWSMEAVSVICN
QLGCPTAIKAPGWANSSAGSGRIWMDHVSCRGNESALWDCKHDGWGKHSNCTHQQDAGVTCSDGSNLEMRLTRGGNMCSGRIEIKFQ
GRWGTVCDDNFNIDHASVICRQLECGSAVSFSGSSNFGEGSGPIWFDDLICNGNESALWNCKHQGWGKHNCDHAEDAGVICSKGADLSL
RLVDGVTECSGRLEVRFQGEWGTICDDGWDSYDAAVACKQLGCPTAVTAIGRVNASKGFGHIWLDSVSCQGHEPAVWQCKHEIEWGKH
YCNHNEDAGVTCSDGSDLELRLRGGGSRCAGTVEVEIQRLLGKVCDRGWGLKEADVVCRQLGCGSALKTSYQVYSKIQATNTWLFLSSC
NGNETSLWDCKNWQWGGLTCDHYEEAKITCSAHREPRLVGGDIPCSGRVEVKHGDTWGSICDSDFSLEAASVLCRELQCGTVVSILGGA
HFGEGNGQIWAEEFQCEGHESHLSLCPVAPRPEGTCSHSRDVGVVCSRYTEIRLVNGKTPCEGRVELKTLGAWGSLCNSHWDIEDAHVLC
QQLKCGVALSTPGGARFGKGNGQIWRHMFHCTGTEQHMGDCPVTALGASLCPSEQVASVICSGNQSQTLSSCNSSSLGPTRPTIPEESAVA
CIESGQLRLVNGGGRCAGRVEIYHEGSWGTICDDSWDLSDAHVVCRQLGCGEAINATGSAHFGEGTGPIWLDEMKCNGKESRIWQCHSH
GWGQQNCRHKEDAGVICSEFMSLRLTSEASREACAGRLEVFYNGAWGTVGKSSMSETTVGVVCRQLGCADKGKINPASLDKAMSIPMW
VDNVQCPKGPDTLWQCPSSPWEKRLASPSEETWITCDNKIRLQEGPTSCSGRVEIWHGGSWGTVCDDSWDLDDAQVVCQQLGCGPALK
AFKEAEFGQGTGPIWLNEVKCKGNESSLWDCPARRWGHSECGHKEDAAVNCTDISVQKTPQKATTGRSSRQSSFIAVGILGVVLLAIFVAL
FFLTKKRRQRQRLAVSSRGENLVHQIQYREMNSCLNADDLDLMNSSENSHESADFSAAELISVSKFLPISGMEKEAILSHTEKENGNL
>gi|44771211|ref|NP_056150.1| mediator of RNA polymerase II transcription subunit 13-like [Homo
sapiens], SEQ ID NO: 98
MTAAANWVANGASLEDCHSNLFSLAELTGIKWRRYNFGGHGDCGPIISAPAQDDPILLSFIRCLQANLLCVWRRDVKPDCKELWIFWWGD
EPNLVGVIHHELQVVEEGLWENGLSYECRTLLFKAIFINLLERCLMDKNFVRIGKWFVRPYEKDEKPVNKSEHLSCAFTFFLHGESNVCTSV
EIAQHQPIYLINEEHIHMAQSSPAPFQVLVSPYGLNGTLTGQAYKMSDPATRKLIEEWQYFYPMVLKKKEESKEEDELGYDDDFPVAVEVI
VGGVRMVYPSAFVLISQNDIPVPQSVASAGGHIAVGQQGLGSVKDPSNCGMPLTPPTSPEQAILGESGGMQSAASHLVSQDGGMITMHSP
KRSGKIPPKLHNHMVHRVWKECILNRTQSKRSQMSTPTLEEEPASNPATWDFVDPTQRVSCSCSRHKLLKRCAVGPNRPPTVSQPGFSAG
PSSSSSLPPPASSKHKTAERQEKGDKLQKRPLIPFHHRPSVAEELCMEQDTPGQKLGLAGIDSSLEVSSSRKYDKQMAVPSRNTSKQMNLN
PMDSPHSPISPLPPTLSPQPRGQETESLDPPSVPVNPALYGNGLELQQLSTLDDRTVLVGQRLPLMAEVSETALYCGIRPSNPESSEKWWHS
YRLPPSDDAEFRPPELQGERCDAKMEVNSESTALQRLLAQPNKRFKIWQDKQPQLQPLHFLDPLPLSQQPGDSLGEVNDPYTFEDGDIKYIF
TANKKCKQGTEKDSLKKNKSEDGFGTKDVTTPGHSTPVPDGKNAMSIFSSATKTDVRQDNAAGRAGSSSLTQVTDLAPSLHDLDNIFDNS
DDDELGAVSPALRSSKMPAVGTEDRPLGKDGRAAVPYPPTVADLQRMFPTPPSLEQHPAFSPVMNYKDGISSETVTALGMMESPMVSMV
STQLTEFKMEVEDGLGSPKPEEIKDFSYVHKVPSFQPFVGSSMFAPLKMLPSHCLLPLKIPDACLFRPSWAIPPKIEQLPMPPAATFIRDGYN
NVPSVGSLADPDYLNTPQMNTPVTLNSAAPASNSGAGVLPSPATPRFSVPTPRTPRTPRTPRGGGTASGQGSVKYDSTDQGSPASTPSTTR
PLNSVEPATMQPIPEAHSLYVTLILSDSVMNIFKDRNFDSCCICACNMNIKGADVGLYIPDSSNEDQYRCTCGFSAIMNRKLGYNSGLFLED
ELDIFGKNSDIGQAAERRLMMCQSTFLPQVEGTKKPQEPPISLLLLLQNQHTQPFASLNFLDYISSNNRQTLPCVSWSYDRVQADNNDYWT
ECFNALEQGRQYVDNPTGGKVDEALVRSATVHSWPHSNVLDISMLSSQDVVRMLLSLQPFLQDAIQKKRTGRTWENIQHVQGPLTWQQF
HKMAGRGTYGSEESPEPLPIPTLLVGYDKDFLTISPFSLPFWERLLLDPYGGHRDVAYIVVCPENEALLEGAKTFFRDLSAVYEMCRLGQHK
PICKVLRDGIMRVGKTVAQKLTDELVSEWFNQPWSGEENDNHSRLKLYAQVCRHHLAPYLATLQLDSSLLIPPKYQTPPAAAQGQATPGN
AGPLAPNGSAAPPAGSAFNPTSNSSSTNPAASSSASGSSVPPVSSSASAPGISQISTTSSSGFSGSVGGQNPSTGGISADRTQGNIGCGGDTDP
GQSSSQPSQDGQESVTERERIGIPTEPDSADSHAHPPAVVIYMVDPFTYAAEEDSTSGNFWLLSLMRCYTEMLDNLPEHMRNSFILQIVPCQ
YMLQTMKDEQVFYIQYLKSMAFSVYCQCRRPLPTQIHIKSLTGFGPAASIEMTLKNPERPSPIQLYSPPFILAPIKDKQTELGETFGEASQKY
NVLFVGYCLSHDQRWLLASCTDLHGELLETCVVNIALPNRSRRSKVSARKIGLQKLWEWCIGIVQMTSLPWRVVIGRLGRLGHGELKDWS
ILLGECSLQTISKKLKDVCRMCGISAADSPSILSACLVAMEPQGSFVVMPDAVTMGSVFGRSTALNMQSSQLNTPQDASCTHILVFPTSSTIQ
VAPANYPNEDGFSPNNDDMFVDLPFPDDMDNDIGILMTGNLHSSPNSSPVPSPGSPSGIGVGSHFQHSRSQGERLLSREAPEELKQQPLALG
YFVSTAKAENLPQWFWSSCPQAQNQCPLFLKASLHHHISVAQTDELLPARNSQRVPHPLDSKTTSDVLRFVLEQYNALSWLTCNPATQDR
TSCLPVHFVVLTQLYNAIMNIL
>gi|6996021|ref|NP_000388.2| cytochrome b-245 heavy chain [Homo sapiens], SEQ ID NO: 99
MGNWAVNEGLSIFVILVWLGLNVFLFVWYYRVYDIPPKFFYTRKLLGSALALARAPAACLNFNCMLILLPVCRNLLSFLRGSSACCSTRVR
RQLDRNLTFHKMVAWMIALHSAIHTIAHLFNVEWCVNARVNNSDPYSVALSELGDRQNESYLNFARKRIKNPEGGLYLAVTLLAGITGVV
ITLCLILIITSSTKTIRRSYFEVFWYTHHLFVIFFIGLAIHGAERIVRGQTAESLAVHNITVCEQKISEWGKIKECPIPQFAGNPPMTWKWIVGPM
FLYLCERLVRFWRSQQKVVITKVVTHPFKTIELQMKKKGFKMEVGQYIFVKCPKVSKLEWHPFTLTSAPEEDFFSIHIRIVGDWTEGLFNAC
GCDKQEFQDAWKLPKIAVDGPFGTASEDVFSYEVVMLVGAGIGVTPFASILKSVWYKYCNNATNLKLKKIYFYWLCRDTHAFEWFADLL
QLLESQMQERNNAGFLSYNIYLTGWDESQANHFAVHHDEEKDVITGLKQKTLYGRPNWDNEFKTIASQHPNTRIGVFLCGPEALAETLSK
QSISNSESGPRGVHFIFNKENF
>gi|31377782|ref|NP_006245.2| protein kinase C delta type [Homo sapiens], SEQ ID NO: 100
MAPFLRIAFNSYELGSLQAEDEANQPFCAVKMKEALSTERGKTLVQKKPTMYPEWKSTFDAHIYEGRVIQIVLMRAAEEPVSEVTVGVSV
LAERCKKNNGKAEFWLDLQPQAKVLMSVQYFLEDVDCKQSMRSEDEAKFPTMNRRGAIKQAKIHYIKNHEFIATFFGQPTFCSVCKDFV
WGLNKQGYKCRQCNAAIHKKCIDKIIGRCTGTAANSRDTIFQKERFNIDMPHRFKVHNYMSPTFCDHCGSLLWGLVKQGLKCEDCGMNV
HHKCREKVANLCGINQKLLAEALNQVTQRASRRSDSASSEPVGIYQGFEKKTGVAGEDMQDNSGTYGKIWEGSSKCNINNFIFHKVLGKG
SFGKVLLGELKGRGEYFAIKALKKDVVLIDDDVECTMVEKRVLTLAAENPFLTHLICTFQTKDHLFFVMEFLNGGDLMYHIQDKGRFELYA
TFYAAEIMCGLQFLHSKGIIYRDLKLDNVLLDRDGHIKIADFGMCKENIFGESRASTFCGTPDYIAPEILQGLKYTFSVDWWSFGVLLYEMLI
GQSPFHGDDEDELFESIRVDTPHYPRWITKESKDILEKLFEREPTKRLGVTGNIKIHPFFKTINWTLLEKRRLEPPFRPKVKSPRDY
SNFDQEFLNEKARLSYSDKNLIDSMDQSAFAGFSFVNPKFEHLLED
>gi|332164777|ref|NP_001193726.1| pyruvate kinase isozymes M1/M2 isoform d [Homo sapiens],
SEQ ID NO: 101
MSKPHSEAGTAFIQTQQLHAAMADTFLEHMCRLDIDSPPITARNTGIICTIGPASRSVELKKGATLKITLDNAYMEKCDENILWLDYKNICK
VVEVGSKIYVDDGLISLQVKQKGADFLVTEVENGGSLGSKKGVNLPGAAVDLPAVSEKDIQDLKFGVEQDVDMVFASFIRKASDVHEVRK
VLGEKGKNIKIISKIENHEGVRRFDEILEASDGIMVARGDLGIEIPAEKVFLAQKMMIGRCNRAGKPVICATQMLESMIKKPRPTRAEGSDVA
NAVLDGADCIMLSGETAKGDYPLEAVRMQHLIAREAEAAIYHLQLFEELRRLAPITSDPTEATAVGAVEASFKCCSGAIIVLTKSGRSAHQV
ARYRPRAPIIAVTRNPQTARQAHLYRGIFPVLCKDPVQEAWAEDVDLRVNFAMNVGKARGFFKKGDVVIVLTGWRPGSGFTNTMRVVPV
P
>gi|148596984|ref|NP_004478.3| Golgin subfamily B member 1 [Homo sapiens], SEQ ID NO: 102
MLSRLSGLANVVLHELSGDDDTDQNMRAPLDPELHQESDMEFNNTTQEDVQERLAYAEQLVVELKDBRQKDVQLQQKDEALQEERKAA
DNKIKKLKLHAKAKLTSLNKYIEEMKAQGGTVLPTEPQSEEQLSKHDKSSTEEEMEIEKIKHKLQEKEELISTLQAQLTQAQAEQPAQSSTE
MEEFVMMKQQLQEKEEFISTLQAQLSQTQAEQAAQQVVREKDARFETQVRLHEDELLQLVTQADVETEMQQKLRVLQRKLEEHEESLV
GRAQVVDLLQQELTAAEQRNQILSQQLQQMEAEHNTLRNTVETEREESKILLEKMELEVAERKLSFHNLQEEMHHLLEQFEQAGQAQAEL
ESRYSALEQKHKAEMEEKTSHILSLQKTGQELQSACDALKDQNSKLLQDKNEQAVQSAQTIQQLEDQLQQKSKEISQFLNRLPLQQHETAS
QTSFPDVYNEGTQAVTEENIASLQKRVVELENEKGALLLSSIELEELKAENEKLSSQITLLEAQNRTGEADREVSEISIVDIANKRSSSAEESG
QDVLENTFSQKHKELSVLLLEMKEAQEEIAFLKLQLQGKRAEEADHEVLDQKEMKQMEGEGIAPIKMKVFLEDTGQDFPLMPNEESSLPA
VEKEQASTEHQSRTSEEISLNDAGVELKSTKQDGDKSLSAVPDIGQCHQDELERLKSQ1LELELNFHKAQE1YEKNLDEKAKEISNLNQUEE
FKKNADNNSSAFTALSEERDQLLSQVKELSMVTELRAQVKQLEMNLAEAERQRRLDYESQTAHDNLLTEQIHSLSIEAKSKDVKIEVLQNE
LDDVQLQFSEQSTLIRSLQSQLQNKESEVLEGAERVRHISSKVEELSQALSQKELEITKMDQLLLEKKRDVETLQQTIEEKDQQVTEISFSM
TEKMVQLNEEKFSLGVEIKTLKEQLNLLSRAEEAKKEQVEEDNEVSSGLKQNYDEMSPAGQISKEELQHEFDLLKKENEQRKRKLQAALIN
RKELLQRVSRLEEELANLKDESKKEIPLSETERGEVEEDKENKEYSEKCVTSKCQEIEIYLKQTISEKEVELQHIRKDLEEKLAAEEQFQALV
KQMNQTLQDKTNQIDLLQAEISENQAIIQKLITSNTDASDGDSVALVKETVVISPPCTGSSEHWKPELEEKILALEKEKEQLQKKLQEALTSR
KAILKKAQEKERHLREELKQQKDDYNRLQEQFDEQSKENENIGDQLRQLQIQVRESIDGKLPSTDQQESCSSTPGLEEPLFKATEQHHTQP
VLESNLCPDWPSHSEDASALQGGTSVAQIKAQLKEIEAEKVELELKVSSTTSELTKKSEEVFQLQEQINKQGLEIESLKTVSHEAEVHAESLQ
QKLESSQLQIAGLEHLRELQPKLDELQKLISKKEEDVSYLSGQLSEKEAALTKIQTEBEQEDLIKALHTQLEMQAKEHDERIKQLQVELCEM
KQKPEEIGEESRAKQQIQRKLQAALISRKEALKENKSLQEELSLARGTIERLTKSLADVESQVSAQNKEKDTVLGRLALLQEERDKLITEMD
RSLLENQSLSSSCESLKLALEGLTEDKEKLVKEIESLKSSKIAESTEWQEKHKELQKEYEILLQSYENVSNEAERIQHVVEAVRQEKQELYGK
LRSTEANKKETEKQLQEAEQEMEEMKEKMRKFAKSKQQKILELEEENDRLRAEVHPAGDTAKECMETLLSSNASMKEELERVKMEYETL
SKKFQSLMSEKDSLSEEVQDLKHQIEGNVSKQANLEATEKHDNQTNVTEEGTQSIPGETEEQDSLSMSTRPTCSESVPSAKSANPAVSKDF
SSHDEINNYLQQIDQLKERIAGLEEEKQKNKEFSQTLENEKNTLLSQISTKDGELKMLQEEVTKMNLLNQQIQEELSRVTKLKETAEEEKDD
LEERLMNQLAELNGSIGNYCQDVTDAQIKNELLESEMKNLKKCVSELEEEKQQLVKEKTKVESEIRKEYLEKIQGAQKEPGNKSHAKELQ
ELLKEKQQEVKQLQKDCIRYQEKISALERTVKALEFVQTESQKDLEITKENLAQAVEHRKKAQAELASFKVLLDDTQSEAARVLADNLKL
KKELQSNKESVKSQMKQKDEDLERRLEQAEEKHLKEKKNMQEKLDALRREKVHLEETIGEIQVTLNKKDKEVQQLQENLDSTVTQLAAF
TKSMSSLQDDRDRVIDEAKKWERKFSDAIQSKEEEIRLKEDNCSVLKDQLRQMSIHMEELKINISRLEHDKQIWESKAQTEVQLQQKVCDT
LQGENKELLSQLEETRHLYHSSQNELAKLESELKSLKDQLTDLSNSLEKCKEQKGNLEGIIRQQEADIQNSKFSYEQLETDLQASRELTSRLH
EEINMKEQKIISLLSGKEEAIQVAIAELRQQHDKEIKELENLLSQEEEENIVLEEENKKAVDKTNQLMETLKTIKKENIQQKAQLDSFVKSMS
SLQNDRDRIVGDYQQLEERHLSIILEKDQLIQEAAAENNKLKEEIRGLRSHMDDLNSENAKLDAELIQYREDLNQVITIKDSQQKQLLEVQL
QQNKELENKYAKLEEKLKESEEANEDLRRSFNALQEEKQDLSKEIESLKVSISQLTRQVTALQEEGTLGLYHAQLKVKEEEVHRLSALFSSS
QKRIAELEEELVCVQKEAAKKVGEIEDKLKKELKHLHHDAGIMRNETETAEERVAELARDLVEMEQKLLMVTKENKGLTAQIQSFGRSMS
SLQNSRDHANEELDELKRKYDASLKELAQLKEQGLLNRERDALLSETAFSMNSTEENSLSHLEKLNQQLLSKDEQLLHLSSQLEDSYNQV
QSFSKAMASLQNERDHLWNELEKFRKSEEGKQRSAAQPSTSPAEVQSLKKAMSSLQNDRDRLLKELKNLQQQYLQINQEITELHPLKAQL
QEYQDKTKAFQINIQEELRQENLSWQHELHQLRMEKSSWEIHERRMKEQYLMAISDKDQQLSHLQNLIRELRSSSSQTQPLKVQYQRQAS
PETSASPDGSQNLVYETELLRTQLNDSLKEIHQKELRIQQLNSNFSQLLEEKNTLSIQLCDTSQSLRENQQHYGDLLNHCAVLEKQVQELQA
GPLNIDVAPGAPQEKNGVHRKSDPEELREPQQSFSEAQQQLCNTRQEVNELRKLLEEERDQRVAAENALSVAEEQIRRLEHSEWDSSRTPII
GSCGTQEQALLIDLTSNSCRRTRSGVGWKRVLRSLCHSRTRVPLLAAIYFLMIHVLLILCFTGHL
>gi|4506547|ref|NP_002924.1| ribonuclease pancreatic precursor [Homo sapiens], SEQ ID NO: 103
MALEKSLVRLLLLVLILLVLGWVQPSLGKESRAKKFQRQHMDSDSSPSSSSTYCNQMMRRRNMTQGRCKPVNTFVHEPLVDVQNVCFQE
KVTCKNGQGNCYKSNSSMHITDCRLTNGSRYPNCAYRTSPKERHIIVACEGSPYVPVHFDASVEDST
>gi|255759952|ref|NP_001157281.1| WD repeat-containing protein 81 isoform 1 [Homo sapiens],
SEQ ID NO: 104
MAQGSGGREGALRTPAGGWHSPPSPDMQELLRSVERDLSIDPRQLAPAPGGTHVVALVPARWLASLRDRRLPLGPCPRAEGLGEAEVRTL
LQRSVQRLPAGWTRVEVHGLRKRRLSYPLGGGLPFEDGSCGPETLTRFMQEVAAQNYRNLWRHAYHTYGQPYSHSPAPSAVPALDSVR
QALQRVYGCSFLPVGETTQCPSYAREGPCPPRGSPACPSLLRAEALLESPEMLYVVHPYVQFSLHDVVTFSPAKLTNSQAKVLFILFRVLRA
MDACHRQGLACGALSLYHIAVDEKLCSELRLDLSAYERPEEDENEEAPVARDEAGIVSQEEQGGQPGQPTGQEELRSLVLDWVHGRISNF
HYLMQLNRLAGRRQGDPNYHPVLPWVVDFTTPHGRFRDLRKSKFRLNKGDKQLDFTYEMTRQAFVAGGAGGGEPPHVPHHISDVLSDIT
YYVYKARRTPRSVLCGHVRAQWEPHEYPASMERMQNWTPDECIPEFYTDPSIFRSIHPDMPDLDVPAWCSSSQEFVAAHRALLESREVSR
DLHHWIDLTFGYKLQGKEAVKEKNVCLHLVDAHTHLASYGVVQLFDQPHPQRLAGAPALAPEPPLIPKLLVQTIQETTGREDFTENPGQLP
NGVGRPVLEATPCEASWTRDRPVAGEDDLEQATEALDSISLAGKAGDQLGSSSQASPGLLSFSVASASRPGRRNKAAGADPGEGEEGRILL
PEGFNPMQALEELEKTGNFLAKGLGGLLEVPEQPRVQPAVPLQCLLHRDMQALGVLLAEMVFATRVRTLQPDAPLWVRFQAVRGLCTRH
PKEVPVSLQPVLDTLLQMSGPEVPMGAERGKLDQLFEYRPVSQGLPPPCPSQLLSPFSSVVPFPPYFPALHRFILLYQARRVEDEAQGRELV
FALWQQLGAVLKDITPEGLEILLPFVLSLMSEEHTAVYTAWYLFEPVAKALGPKNANKYLLKPLIGAYESPCQLHGRFYLYTDCFVAQLMV
RLGLQAFLTHLLPHVLQVLAGAEASQEESKDLAGAAEEEESGLPGAGPGSCAFGEEIPMDGEPPASSGLGLPDYTSGVSFHDQADLPETEDF
QAGLYVTESPQPQEAEAVSLGRLSDKSSTSETSLGEERAPDEGGAPVDKSSLRSGDSSQDLKQSEGSEEEEEEEDSCVVLEEEEGEQEEVTG
ASELTLSDTVLSMETVVAGGSGGDGEEEEEALPEQSEGKEQKILLDTACKMVRWLSAKLGPTVASRHVARNLLRLLTSCYVGPTRQQFTV
SSGESPPLSAGNIYQKRPVLGDIVSGPVLSCLLHIARLYGEPVLTYQYLPYISYLVAPGSASGPSRLNSRKEAGLLAAVTLTQKIIVYLSDTTL
MDILPRISHEVLLPVLSFLTSLVTGFPSGAQARTILCVKTISLIALICLRIGQEMVQQHLSEPVATFFQVFSQLHELRQQDLKLDPAGRGEGQLP
QVVFSDGQQRPVDPALLDELQKVFTLEMAYTIYVPFSCLLGDIIRKIIPNHELVGELAALYLESISPSSRNPASVEPTMPGTGPEWDPHGGGC
PQDDGHSGTFGSVLVGNRIQIPNDSRPENPGPLGPISGVGGGGLGSGSDDNALKQELPRSVHGLSGNWLAYWQYEIGVSQQDAHFHFHQI
RLQSFPGHSGAVKCVAPLSSEDFFLSGSKDRTVRLWPLYNYGDGTSETAPRLVYTQHRKSVFFVGQLEAPQHVVSCDGAVHVWDPFTGK
TLRTVEPLDSRVPLTAVAVMPAPHTSITMASSDSTLRFVDCRKPGLQHEFRLGGGLNPGLVRALAISPSGRSVVAGFSSGFMVLLDTRTGLV
LRGWPAHEGDILQIKAVEGSVLVSSSSDHSLTVWKELEQKPTHHYKSASDPIHTFDLYGSEVVTGTVSNKIGVCSLLEPPSQATTKLSSENF
RGTLTSLALLPTKRHLLLGSDNGVIRLLA
>gi|156119605|ref|NP_036336.2| general transcription factor 3C polypeptide 4 [Homo sapiens],
SEQ ID NO: 105
MNTADQARVGPADDGPAPSGEEEGEGGGEAGGKEPAADAAPGPSAAFRLMVTRREPAVKLQYAVSGLEPLAWSEDHRVSVSTARSIAVL
ELICDVHNPGQDLVIHRTSVPAPLNSCLLKVGSKTEVAECKEKFAASKDPTVSQTFMLDRVFNPEGKALPPMRGFKYTSWSPMGCDANGR
CLLAALTMDNRLTIQANLNRLQWVQLVDLTEIYGERLYETSYRLSKNEAPEGNLGDFAEFQRRHSMQTPVRMEWSGICTTQQVKHNNEC
RDVGSVLLAVLFENGNIAVWQFQLPFVGKESISSCNTIESGITSPSVLFWWEYEHNNRKMSGLIVGSAFGPIKILPVNLKAVKGYFTLRQPVI
LWKEMDQLPVHSIKCVPLYHPYQKCSCSLVVAARGSYVFWCLLLISKAGLNVHNSHVTGLHSLPIVSMTADKQNGTVYTCSSDGKVRQLI
PIFTDVALKFEHQLIKLSDVFGSVRTHGIAVSPCGAYLAIITTEGMINGLHPVNKNYQVQFVTLKTFEEAAAQLLESSVQNLFKQVDLIDLVR
WKILKDKHIPQFLQEALEKKIESSGVTYFWRFKLFLLRILYQSMQKTPSEALWKPTHEDSKILLVDSPGMGNADDEQQEEGTSSKQVVKQG
LQERSKEGDVEEPTDDSLPTTGDAGGREPMEEKLLEIQGKIEAVEMHLTREHMKRVLGEVYLHTWITENTSIPTRGLCNFLMSDEEYDDRT
ARVLIGHISKKMNKQTFPEHCSLCKEILPFTDRKQAVCSNGHIWLRCFLTYQSCQSLIYRRCLLHDSIARHPAPEDPDWIKRLLQSPCPFCDS
PVF
>gi|11386161|ref|NP_001843.1| collagen alpha-2(IX) chain precursor [Homo sapiens], SEQ ID NO: 106
MAAATASPRSLLVLLQVVVLALAQIRGPPGERGPPGPPGPPGVPGSDGIDGDNGPPGKAGPPGPKGEPGKAGPDGPDGKPGIDGLTGAKGE
PGPMGIPGVKGQPGLPGPPGLPGPGFAGPPGPPGPVGLPGEIGIRGPKGDPGPDGPSGPPGPPGKPGRPGTIQGLEGSADFLCPTNCPPGMKG
PPGLQGVKGHAGKRGILGDPGHQGKPGPKGDVGASGEQGIPGPPGPQGIRGYPGMAGPKGETGPHGYKGMVGAIGATGPPGEEGPRGPP
GRAGEKGDEGSPGIRGPQGITGPKGATGPPGINGKDGTPGTPGMKGSAGQAGQPGSPGHQGLAGVPGQPGTKGGPGDQGEPGPQGLPGFS
GPPGKEGEPGPRGEIGPQGIMGQKGDQGERGPVGQPGPQGRQGPKGEQGPPGIPGPQGLPGVKGDKGSPGKTGPRGKVGDPGVAGLPGE
KGEKGESGEPGPKGQQGVRGEPGYPGPSGDAGAPGVQGYPGPPGPRGLAGNRGVPGQPGRQGVEGRDATDQHIVDVALKMLQEQLAEV
AVSAKREALGAVGMMGPPGPPGPPGYPGKQGPHGHPGPRGVPGIVGAVGQIGNTGPKGKRGEKGDPGEVGRGHPGMPGPPGIPGLPGRP
GQAINGKDGDRGSPGAPGEAGRPGLPGPVGLPGFCEPAACLGASAYASARLTEPGSIKGP
>gi|148806884|ref|NP_001092103.1| proline-rich AKT1 substrate 1 [Homo sapiens], SEQ ID NO: 107
MASGRPEELWEAVVGAAERFRARTGTELVLLTAAPPPPPRPGPCAYAAHGRGALAEAARRCLHDIALAHRAATAARPPAPPPAPQPPSPTP
SPPRPTLAREDNEEDEDEPTETETSGEQLGISDNGGLFVMDEDATLQDLPPFCESDPESTDDGSLSEETPAGPPTCSVPPASALPTQQYAKSL
PVSVPVWGFKEKRTEARSSDEENGPPSSPDLDRIAASMRALVLREAEDTQVFGDLPRPRLNTSDFQKLKRKY
>gi|62739186|ref|NP_000177.2| complement factor H isoform a precursor [Homo sapiens],
SEQ ID NO: 108
MRLLAKIICLMLWAICVAEDCNELPPRRNTEILTGSWSDQTYPEGTQAIYKCRPGYRSLGNVIMVCRKGEWVALNPLRKCQKRPCGHPGD
TPFGTFTLTGGNVFEYGVKAVYTCNEGYQLLGEINYRECDTDGWTNDIPICEVVKCLPVTAPENGKIVSSAMEPDREYHFGQAVRFVCNS
GYKIEGDEEMHCSDDGFWSKEKPKCVEISCKSPDVINGSPISQKIIYKENERFQYKCNMGYEYSERGDAVCTESGWRPLPSCEEKSCDNPYI
PNGDYSPLRIKHRTGDEITYQCRNGFYPATRGNTAKCTSTGWIPAPRCTLKPCDYPDIKHGGLYHENMRRPYFPVAVGKYYSYYCDEHFE
TPSGSYWDHIHCTQDGWSPAVPCLRKCYFPYLENGYNQNHGRKFVQGKSIDVACHPGYALPKAQTTVTCMENGWSPTPRCIRVKTCSKS
SIDIENGFISESQYTYALKEKAKYQCKLGYVTADGETSGSITCGKDGWSAQPTCIKSCDIPVFMNARTKNDFTWFKLNDTLDYECHDGYES
NTGSTTGSIVCGYNGWSDLPICYERECELPKIDVHLVPDRKKDQYKVGEVLKFSCKPGFTIVGPNSVQCYHFGLSPDLPICKEQVQSCGPPP
ELLNGNVKEKTKEEYGHSEVVEYYCNPRFLMKGPNKIQCVDGEWTTLPVCIVEESTCGDIPELEHGWAQLSSPPYYYGDSVEFNCSESFT
MIGHRSITCIHGVWTQLPQCVAIDKLKKCKSSNLIILEEHLKNKKEFDHNSNIRYRCRGKEGWIHTVCINGRWDPEVNCSMAQIQLCPPPPQI
PNSHNMTTTLNYRDGEKVSVLCQENYLIQEGEEITCKDGRWQSIPLCVEKIPCSQPPQIEHGTINSSRSSQESYAHGTKLSYTCEGGFRISEE
NETTCYMGKWSSPPQCEGLPCKSPPEISHGVVAHMSDSYQYGEEVTYKCFEGFGIDGPAIAKCLGEKWSHPPSCIKTDCLSLPSFENAIPMG
EKKDVYKAGEQVTYTCATYYKMDGASNVTCINSRWTGRPTCRDTSCVNPPTVQNAYIVSRQMSKYPSGERVRYQCRSPYEMFGDEEVM
CLNGNWTEPPQCKDSTGKCGPPPPIDNGDITSFPLSVYAPASSVEYQCQNLYQLEGNKRITCRNGQWSEPPKCLHPCVISREIMENYNIALR
WTAKQKLYSRTGESVEFVCKRGYRLSSRSHTLRTTCWDGKLEYPTCAKR
>gi|4758668|ref|NP_004854.1| serine palmitoyltransferase 2 [Homo sapiens], SEQ ID NO: 109
MRPEPGGCCCRRTVRANGCVANGEVRNGYVRSSAAAAAAAAAGQIHHVTQNGGLYKRPFNEAFEETPMLVAVLTYVGYGVLTLFGYLR
DFLRYWRIEKCHHATEREEQKDFVSLYQDFENFYTRNLYMRIRDNWNRPICSVPGARVDIMERQSHDYNWSFKYTGNIIKGVINMGSYN
YLGFARNTGSCQEAAAKVLEEYGAGVCSTRQEIGNLDKHEELEELVARFLGVEAAMAYGMGFATNSMNIPALVGKGCLILSDELNHASLV
LGARLSGATIRIFKHNNMQSLEKLLKDAIVYGQPRTRRPWKKILILVEGIYSMEGSIVRLPEVIALKKKYKAYLYLDEAHSIGALGPTGRGVV
EYFGLDPEDVDVMMGTFTKSFGASGGYIGGKKELIDYLRTHSHSAVYATSLSPPVVEQIITSMKCIMGQDGTSLGKECVQQLAENTRYFRR
RLKEMGFIIYGNEDSPVVPLMLYMPAKIGAFGREMLKRNIGVVVVGFPATPIIESRARFCLSAAHTKEILDTALKEIDEVGDLLQLKYSRHRL
VPLLDRPFDETTYEETED
>gi|4507467|ref|NP_000349.1| transforming growth factor-beta-induced protein ig-h3 precursor
[Homo sapiens], SEQ ID NO: 110
MALFVRLLALALALALGPAATLAGPAKSPYQLVLQHSRLRGRQHGPNVCAVQKVIGTNRKYFTNCKQWYQRKICGKSTVISYECCPGYE
KVPGEKGCPAALPLSNLYETLGVVGSTTTQLYTDRTEKLRPEMEGPGSFTIFAPSNEAWASLPAEVLDSLVSNVNIELLNALRYHMVGRRV
LTDELKHGMTLTSMYQNSNIQIHHYPNGIVTVNCARLLKADHHATNGVVHLIDKVISTITNNIQQIIEIEDTFETLRAAVAASGLNTMLEGN
GQYTLLAPTNEAFEKIPSETLNRILGDPEALRDLLNNHILKSAMCAEAIVAGLSVETLEGTTLEVGCSGDMLTINGKAIISNKDILATNGVIHY
IDELLIPDSAKTLFELAAESDVSTAIDLFRQAGLGNHLSGSERLTLLAPLNSVFKDGTPPIDAHTRNLLRNHIIKDQLASKYLYHGQTLETLGG
KKLRVFVYRNSLCIENSCIAAHDKRGRYGTLFTMDRVLTPPMGTVMDVLKGDNRFSMLVAAIQSAGLTETLNREGVYTVFAPTNEAFRAL
PPRERSRLLGDAKELANILKYHIGDEILVSGGIGALVRLKSLQGDKLEVSLKNNVVSVNKEPVAEPDIMATNGVVHVITNVLQPPANRPQER
GDELADSALEIFKQASAFSRASQRSVRLAPVYQKLLERMKH
>gi|55743151|ref|NP_079408.3| WD repeat-containing protein 19 [Homo sapiens], SEQ ID NO: 111
MKRIFSLLEKTWLGAPIQFAWQKTSGNYLAVTGADYIVKIFDRHGQKRSEINLPGNCVAMDWDKDGDVLAVIAEKSSCIYLWDANTNKTS
QLDNGMRDQMSFLLWSKVGSFLAVGTVKGNLLIYNHQTSRKIPVLGKHTKRITCGCWNAENLLALGGEDKMITVSNQEGDTIRQTQVRSE
PSNMQFFLMKMDDRTSAAESMISVVLGKKTLFFLNLNEPDNPADLEFQQDFGNIVCYNWYGDGRIMIGFSCGHFVVISTHTGELGQEIFQA
RNHKDNLTSIAVSQTLNKVATCGDNCIKIQDLVDLKDMYVILNLDEENKGLGTLSWTDDGQLLALSTQRGSLHVFLTKLPILGDACSTRIA
YLTSLLEVTVANPVEGELPITVSVDVEPNFVAVGLYHLAVGMNNRAWFYVLGENAVKKLKDMEYLGTVASICLHSDYAAALFEGKVQLH
LIESEILDAQEERETRLFPAVDDKCRILCHALTSDFLIYGTDTGVVQYFYIEDWQFVNDYRHPVSVKKIFPDPNGTRLVFIDEKSDGFVYCPV
NDATYEIPDFSPTIKGVLWENWPMDKGVFIAYDDDKVYTYVFHKDTIQGAKVILAGSTKVPFAHKPLLLYNGELTCQTQSGKVNNIYLST
HGFLSNLKDTGPDELRPMLAQNLMLKRFSDAWEMCRILNDEAAWNELARACLHHMEVEFAIRVYRRIGNVGIVMSLEQIKGIEDYNLLAG
HLAMFTNDYNLAQDLYLASSCPIAALEMRRDLQHWDSALQLAKHLAPDQIPFISKEYAIQLEFAGDYVNALAHYEKGITGDNKEHDEACL
AGVAQMSIRMGDIRRGVNQALKHPSRVLKRDCGAILENMKQFSEAAQLYEKGLYYDKAASVYIRSKNWAKVGDLLPHVSSPKIHLQYAK
AKEADGRYKEAVVAYENAKQWQSVIRIYLDHLNNPEKAVNIVRETQSLDGAKMVARFFLQLGDYGSAIQFLVMSKCNNEAFTLAQQHN
KMEIYADIIGSEDTTNEDYQSIALYFEGEKRYLQAGKFFLLCGQYSRALKHFLKCPSSEDNVAIEMAIETVGQAKDELLTNQLIDHLLGEND
GMPKDAKYLFRLYMALKQYREAAQTAIIIAREEQSAGNYRNAHDVLFSMYAELKSQKIKIPSEMATNLMILHSYILVKIFIVKNGDHMKGA
RMLIRVANNISKFPSHIVPILTSTVIECHRAGLKNSAFSFAAMLMRPEYRSKIDAKYKKKIEGMVRRPDISEIEEATTPCPFCKFLLPECELLCP
GCKNSIPYCIATGRHMLKDDWTVCPHCDFPALYSELKIMLNTESTCPMCSERLNAAQLKKISDCTQYLRTEEEL
>gi|47086907|ref|NP_060309.2| lysophosphatidylcholine acyltransferase 2 [Homo sapiens],
SEQ ID NO: 112
MSRCAQAAEVAATVPGAGVGNVGLRPPMVPRQASFFPPPVPNPFVQQTQIGSARRVQIVLLGIILLPIRVLLVALILLLAWPFAAISTVCCPE
KLTHPITGWRRKITQTALKFLGRAMFFSMGFIVAVKGKIASPLEAPVFVAAPHSTFFDGIACVVAGLPSMVSRNENAQVPLIGRLLRAVQPV
LVSRVDPDSRKNTINEIIKRTTSGGEWPQILVFPEGTCTNRSCLITFKPGAFIPGVPVQPVLLRYPNKLDTVTWTWQGYTFIQLCMLTFCQLF
TKVEVEFMPVQVPNDEEKNDPVLFANKVRNLMAEALGIPVTDHTYEDCRLMISAGQLTLPMEAGLVEFTKISRKLKLDWDGVRKHLDEY
ASIASSSKGGRIGIEEFAKYLKLPVSDVLRQLFALFDRNHDGSIDFREYVIGLAVLCNPSNTEEIIQVAFKLFDVDEDGYITEEEFSTILQASLG
VPDLDVSGLFKEIAQGDSISYEEFKSFALKHPEYAKIFTTYLDLQTCHVFSLPKEVQTTPSTASNKVSPEKHEESTSDKKDD
>gi|21389401|ref|NP_653202.1| CKLF-like MARVEL transmembrane domain-containing protein 3 [Homo
sapiens], SEQ ID NO: 113
MWPPDPDPDPDPEPAGGSRPGPAVPGLRALLPARAFLCSLKGRLLLAESGLSFITFICYVASSASAFLTAPLLEFLLALYFLFADAMQLNDK
WQGLCWPMMDFLRCVTAALIYFAISITAIAKYSDGASKAAGVFGFFATIVFATDFYLIFNDVAKFLKQGDSADETTAHKTEEENSDSDSD
>gi|21361933|ref|NP_110417.2| T-cell immunomodulatory protein precursor [Homo sapiens],
SEQ ID NO: 114
MAAAGRLPSSWALFSPLLAGLALLGVGPVPARALHNVTAELFGAEAWGTLAAFGDLNSDKQTDLFVLRERNDLIVFLADQNAPYFKPKV
KVSFKNHSALITSVVPGDYDGDSQMDVLLTYLPKNYAKSELGAVIFWGQNQTLDPNNMTILNRTFQDEPLIMDFNGDLIPDIFGITNESNQP
QILLGGNLSWHPALTTTSKMRIPHSHAFIDLTEDFTADLFLTTLNATTSTFQFEIWENLDGNFSVSTILEKPQNMMVVGQSAFADFDGDGH
MDHLLPGCEDKNCQKSTIYLVRSGMKQWVPVLQDFSNKGTLWGFVPFVDEQQPTEIPIPITLHIGDYNMDGYPDALVILKNTSGSNQQAFL
LENVPCNNASCEEARRMFKVYWELTDLNQIKDAMVATFFDIYEDGILDIVVLSKGYTKNDFAIHTLKNNFEADAYFVKVIVLSGLCSNDCP
RKITPFGVNQPGPYIMYTTVDANGYLKNGSAGQLSQSAHLALQLPYNVLGLGRSANFLDHLYVGIPRPSGEKSIRKQEWTAIIPNSQLIVIPY
PHNVPRSWSAKLYLTPSNIVLLTAIALIGVCVFILAIIGILHWQEKKADDREKRQEAHRFHFDAM
>gi|31542634|ref|NP_056502.1| filamin-A-interacting protein 1 [Homo sapiens], SEQ ID NO: 115
MRSRNQGGESASDGHISCPKPSIIGNAGEKSLSEDAKKKKKSNRKEDDVMASGTVKRHLKTSGECERKTKKSLELSKEDLIQLLSIMEGEL
QAREDVIHMLKTEKTKPEVLEAHYGSAEPEKVLRVLHRDAILAQEKSIGEDVYEKPISELDRLEEKQKETYRRMLEQLLLAEKCHRRTVYE
LENEKHKHTDYMNKSDDFTNLLEQERERLKKLLEQEKAYQARKEKENAKRLNKLRDELVKLKSFALMLVDERQMHIEQLGLQSQKVQD
LTQKLREEEEKLKAITSKSKEDRQKLLKLEVDFEHKASRFSQEHEEMNAKLANQESHNRQLRLKLVGLTQRIEELEETNKNLQKAEEELQE
LRDKIAKGECGNSSLMAEVENLRKRVLEMEGKDEEITKTESQCRELRKKLQEEEHHSKELRLEVEKLQKRMSELEKLEEAFSKSKSECTQL
HLNLEKEKNLTKDLLNELEVVKSRVKELECSESRLEKAELSLKDDLTKLKSFTVMLVDERKNMMEKIKQEERKVDGLNKNFKVEQGKVM
DVTEKLIEESKKLLKLKSEMEEKVYNLTRERDELIGKLKSEEEKSSELSCSVDLLKKRLDGIEEVEREITRGRSRKGSELTCPEDNKIKELTLEI
ERLKKRLQQLEVVEGDLMKTEDEYDQLEQKFRTEQDKANFLSQQLEEIKHQIAKNKAIEKGEVVSQEAELRHRFRLEEAKSRDLKAEVQA
LKEKIHELMNKEDQLSQLQVDYSVLQQRFMEEENKNKNMGQEVLNLTKELELSKRYSRALRPSVNGRRMVDVPVTSTGVQTDAVSGEA
AEEETPAVFIRKSFQEENHIMSNLRQVGLKKPVERSSVLDRYPPAANELTMRKSWIPWMRKRENGPSITQEKGPRTNSSPGHPGEVVLSPK
QGQPLHIRVTPDHENSTATLEITSPTSEEFFSSTTVIPTLGNQKPRITIIPSPNVMPQKQKSGDTTLGPERAMSPVTITTFSREKTPESGRGAFA
DRPTSPIQIMTVSTSAAPAEIAVSPESQEMPMGRTILKVTPEKQTVPTPVRKYNSNANIITTEDNKIHIHLGSQFKRSPGTSGEGVSPVITVRPV
NVTAEKEVSTGTVLRSPRNHLSSRPGASKVTSTITITPVTTSSARGTQSVSGQDGSSQRPTPTRIPMSKGMKAGKPVVAAPGAGNLTKFEPR
AETQSMKIELKKSAASSTTSLGGGKG
>gi|153791560|ref|NP_001074290.1| zinc finger protein 799 [Homo sapiens], SEQ ID NO: 116
MASVALEDVAVNFTREEWALLGPCQKNLYKDVMQETIRNLDCVGMKWKDQNIEDQYRYPRKNLRCRMLERFVESKDGTQCGETSSQIQ
DSIVTKNTLPGVGPYESRMSGEVIMGHSSLNCYIRVGAGHKPYEYHECGEKPDTHKQRGKAFSYHNSLQTHERLHTGKKPYNCKECGKSF
SSLGNLQRHMAVQRGDGPYKCKLCGKAFFWPSLLHMHERTHTGEKPYECKQCSKAFSFYSSYLRHERTHTGEKLYECKQCSKAFPDYSS
CLRHERTHTGKKPYTCKQCGKAFSASTSLRRHETTHTDEKPYACQQCGKAFHHLGSFQRHMVMHTRDGPHKCKICGKGFDCPSSLKSHE
RTHTGEKLYECKQCGKALSHSSSFRRHMTMHTGDGPHKCKICGKAFVYPSVFQRHEKTHTAEKPYKCKQCGKAYRISSSLRRHETTHTG
EKPYKCKCGKAFIDFYSFQNHKTTHAGEKPYECKECGKAFSCFQYLSQHRRTHTGEKPYECNTCKKAFSHFGNLKVHERIHSGEKPYECK
ECGKAFSWLTCFLRHERIHMREKPYECQQCGKAFTHSRFLQGHEKTHTGENPYECKECGKAFASLSSLHRHKKTHWKKTHTGENPYGCK
ECGKAFASLSSLHRHKKTH
>gi|13562090|ref|NP_112092.1| apolipoprotein L2 [Homo sapiens], SEQ ID NO: 117
MNPESSIFIEDYLKYFQDQVSRENLLQLLTDDEAWNGFVAAAELPRDEADELRKALNKLASHMVMKDKNRHDKDQQHRQWFLKEFPRL
KRELEDHIRKLRALAEEVEQVHRGTTIANVVSNSVGTTSGILTLLGLGLAPFTEGISFVLLDTGMGLGAAAAVAGITCSVVELVNKLRARAQ
ARNLDQSGTNVAKVMKEFVGGNTPNVLTLVDNWYQVTQGIGRNIRAIRRARANPQLGAYAPPPHIIGRISAEGGEQVERVVEGPAQAMSR
GTMIVGAATGGILLLLDVVSLAYESKHLLEGAKSESAEELKKRAQELEGKLNFLTKIHEMLQPGQDQ
>gi|196114945|ref|NP_001124477.1| myocyte-specific enhancer factor 2C isoform 2 [Homo sapiens],
SEQ ID NO: 118
MGRKKIQITRIMDERNRQVTFTKRKFGLMKKAYELSVLCDCEIALEFNSTNKLFQYASTDMDKVLLKYTEYNEPHESRTNSDIVEALNKKE
NKGCESPDPDSSYALTPRTEEKYKKINEEFDNMIKSHKIPAVPPPNFEMPVSIPVSSHNSLVYSNPVSSLGNPNLLPLAHPSLQRNSMSPGVT
HRPPSAGNTGGLMGGDLTSGAGTSAGNGYGNPRNSPGLLVSPGNLNKNMQAKSPPPMNLGMNNRKPDLRVLIPPGSKNTMPSVNQRINN
SQSAQSLATPVVSVATPTLPGQGMGGYPSAISTTYGTEYSLSSADLSSLSGFNTASALHLGSVTGWQQQHLHNMPPSALSQLGACTSTHLS
QSSNLSLPSTQSLNIKSEPVSPPRDRTTTPSRYPQHTRHEAGRSPVDSLSSCSSSYDGSDREDHRNEFHSPIGLTRPSPDERESPSVKRMRLSE
GWAT
>gi|18034767|ref|NP_071387.1| phosphorylated CTD -interacting factor 1 [Homo sapiens],
SEQ ID NO: 119
MANENHGSPREEASLLSHSPGTSNQSQPCSPKPIRLVQDLPEELVHAGWEKCWSRRENRPYYFNRFTNQSLWEMPVLGQHDVISDPLGLN
ATPLPQDSSLVETPPAENKPRKRQLSEEQPSGNGVKKPKIEIPVTPTGQSVPSSPSIPGTPTLKMWGTSPEDKQQAALLRPTEVYWDLDIQTN
AVIKHRGPSEVLPPHPEVELLRSQLILKLRQHYRELCQQREGIEPPRESFNRWMLERKVVDKGSDPLLPSNCEPVVSPSMFREIMNDIPIRLS
RIKFREEAKRLLFKYAEAARRLIESRSASPDSRKVVKWNVEDTFSWLRKDHSASKEDYMDRLEHLRRQCGPHVSAAAKDSVEGICSKIYHI
SLEYVKRIREKHLAILKENNISEEVEAPEVEPRLVYCYPVRLAVSAPPMPSVEMHMENNVVCIRYKGEMVKVSRNYFSKLWLLYRYSCID
DSAFERFLPRVWCLLRRYQMMFGVGLYEGTGLQGSLPVHVFEALHRLFGVSFECFASPLNCYFRQYCSAFPDTDGYFGSRGPCLDFAPLS
GSFEANPPFCEELMDAMVSHFERLLESSPEPLSFIVFIPEWREPPTPALTRMEQSRFKRHQL1LPAFEHEYRSGSQHICKKEEMHYKAVHNTA
VLFLQNDPGFAKWAPTPERLQELSAAYRQSGRSHSSGSSSSSSSEAKDRDSGREQGPSREPHPT
>gi|302191702|ref|NP_001180539.1| tubulin delta chain isoform 3 [Homo sapiens], SEQ ID NO: 120
MSIVTVQLGQCGNQIGFEVFDALLSDSHSSQGLCSMRENEAYQASCKERFFSEEENGVPIARAVLVDMEPKVINQMLSKAAQSGQWKYG
QHACFCQKQGSGNNWAYGYSVHGPRHEESIMNIIRKEVEKCDSFSGFFIIMSMAGGTGSGLGAFVTQNLEDQYSNSLKMNQIIWPYGTGE
VIVQNYNSILTLSHLYRSSDALLLHENDAIHKICAKLMNIKQISFSDINQVLAHQLGSVFQPTYSAESSFHYRRNPLGDLMEHLVPHPEFKML
SVRNIPHMSENSLAYTTFTWAGLLKHLRQMLISNAKMEEGIDRHVWPPLSGLPPLSKMSLNKDLHFNTSIANLVILRGKDVQSADVGKKFR
AYIHQYTKFGIEEEDFLDSFTSLEQVVASYCNL
>gi|57232746|ref|NP_003480.2| nuclear receptor-interacting protein 1 [Homo sapiens],
SEQ ID NO: 121
MTHGEELGSDVHQDSIVLTYLEGLLMHQAAGGSGTAVDKKSAGHNEEDQNFNISGSAFPTCQSNGPVLNTHTYQGSGMLHLKKARLLQS
SEDWNAAKRKRLSDSIMNLNVKKEALLAGMVDSVPKGKQDSTLLASLLQSFSSRLQTVALSQQIRQSLKEQGYALSHDSLKVEKDLRCYG
VASSHLKTLLKKSKVKDQKPDTNLPDVTKNLIRDRFAESPHHVGQSGTKVMSEPLSCAARLQAVASMVEKRASPATSPKPSVACSQLALL
LSSEAHLQQYSREHALKTQNANQAASERLAAMARLQENGQKDVGSYQLPKGMSSHLNGQARTSSSKLMASKSSATVFQNPMGIIPSSPK
NAGYKNSLERNNIKQAANNSLLLHLLKSQTIPKPMNGHSHSERGSIFEESSTPTTIDEYSDNNPSFTDDSSGDESSYSNCVPIDLSCKHRTEK
SESDQPVSLDNFTQSLLNTWDPKVPDVDIKEDQDTSKNSKLNSHQKVTLLQLLLGHKNEENVEKNTSPQGVHNDVSKFNTQNYARTSVIE
SPSTNRFlPVSTPPLLTSSKAGSPINLSQHSLVIKWNSPPYVCSTQSEKLTNTASNHSMDLTKSKDPPGEKPAQNEGAQNSATFSASKLLQN
LAQCGMQSSMSVEEQRPSKQLLTGNTDKPIGMIDRLNSPLLSNKTNAVEENKAFSSQPTGPEPGLSGSEIENLLERRTVLQLLLGNPNKGKS
EKKEKTPLRDESTQEHSERALSEQILMVKIKSEPCDDLQIPNTNVHLSHDAKSAPFLGMAPAVQRSAPALPVSEDFKSEPVSPQDFSFSKNG
LLSRLLRQNQDSYLADDSDRSHRNNEMALLESKNLCMVPKKRKLYTEPLENPFKKMKNNIVDAANNHSAPEVLYGSLLNQEELKFSRND
LEFKYPAGHGSASESEHRSWARESKSFNVLKQLLLSENCVRDLSPHRSNSVADSKKKGHKNNVTNSKPEFSISSLNGLMYSSTQPSSCMDN
RTFSYPGVVKTPVSPTFPEHLGCAGSRPESGLLNGCSMPSEKGPIKWVITDAEKNEYEKDSPRLTKTNPILYYMLQKGGNSVTSRETQDKDI
WREASSAESVSQVTAKEELLPTAETKASFFNLRSPYNSHMGNNASRPHSANGEVYGLLGSVLTIKKESE
>gi|169636420|ref|NP_001207.2| carbonic anhydrase 9 precursor [Homo sapiens], SEQ ID NO: 122
MAPLCPSPWLPLLIPAPAPGLTVQLLLSLLLLVPVHPQRLPRMQEDSPLGGGSSGEDDPLGEEDLPSEEDSPREEDPPGEEDLPGEEDLPGEE
DLPEVKPKSEEEGSLKLEDLPTVEAPGDPQEPQNNAHRDKEGDDQSHWRYGGDPPWPRVSPACAGRFQSPVDIRPQLAAFCPALRPLELL
GFQLPPLPELRLRNNGHSVQLTLPPGLEMALGPGREYRALQLHLHWGAAGRPGSEHTVEGHRFPAEIHVVHLSTAFARVDEALGRPGGLA
VLAAFLEEGPEENSAYEQLLSRLEEIAEEGSETQVPGLDISALLPSDFSRYFQYEGSLTTPPCAQGVIWTVFNQTVMLSAKQLHTLSDTLWG
PGDSRLQLNFRATQPLNGRVIEASFPAGVDSSPRAAEPVQLNSCLAAGDILALVFGLLFAVTSVAFLVQMRRQHRRGTKGGVSYRPAEVAE
TGA
>gi|45439306|ref|NP_001340.2| aspartyl-tRNA synthetase, cytoplasmic [Homo sapiens], SEQ ID NO: 123
MPSASASRKSQEKPREIMDAAEDYAKERYGISSMIQSQEKPDRVLVRVRDLTIQKADEVVWVRARVHTSRAKGKQCFLVLRQQQFNVQA
LVAVGDHASKQMVKFAANINKESIVDVEGVVRKVNQKIGSCTQQDVELHVQKIYVISLAEPRLPLQLDDAVRPEAEGEEEGRATVNQDTR
LDNRVIDLRTSTSQAVFRLQSGICHLFRETLINKGFVEIQTPKIISAASEGGANVFTVSYFKNNAYLAQSPQLYKQMCICADFEKVFSIGPVFR
AEDSNTHRHLTEFVGLDIEMAFNYHYHEVMEEIADTMVQIFKGLQERFQTEIQTVNKQFPCEPFKFLEPTLRLEYCEALAMLREAGVEMG
DEDDLSTPNEKLLGHLVKEKYDTDFYILDKYPLAVRPFYTMPDPRNPKQSNSYDMFMRGEEILSGAQRIHDPQLLTERALHHGIDLEKIKA
YIDSFRFGAPPHAGGGIGLERVTMLFLGLHNVRQTSMFPRDPKRLTP
>gi|1310118388|ref|XP_003119104.1| PREDICTED: putative Ras GTPase-activating protein 4B isoform 5
[Homo sapiens],SEQ ID NO: 124
MIQSSSTPTRDLAPKDRNGTSDPFVRVRYKGRTRETSIVKKSCYPRWNETFEFELQEGAMEALCVEAWDWDLVSRNDFLGKVVIDVQRLR
VVQQEEGWFRLQPDQSKSRRHDEGNLGSLQLEVRLRDETVLPSSYYQPLVHLLCHEVKLGMQGPGQLIPLIEETTSTECRQDVATNLLKLF
LGQGLAKDFLDLLFQLELSRTSETNTLFRSNSLASKSVESFLKVAGMQYLHGVLGPIINKVFEEKKYVELDPSKVEVKDVGCSGLHRPQTEA
EVLEQSAQTLRAHLGALLSALSRSVRACPAVVRATFRQLFRRVRERFPGAQHENVPFIAVTSFLCLRFFSPAIMSPKLFHLRERHADARTSR
TLLLLAKAVQNVGNMDTPASRAKEAWMEPLQPTVHQGVAQLKDFITKLVDIEEKDELDLQRTLSLQAPPVKEGPLFIHRTKGKGPLMSSSF
KKLYFSLTTEALSFAKTPSSKKSALIKLANIRAAEKVEEKSFGGSHVMQVIYTDDAGRPQTAYLQCKCVNELNQWLSALRKVSINNTGLLG
SYHPGVFRGDKWSCCHQKEKTGQGCDKTRSRVTLQEWNDPLDHDLEAQLIYRHLLGVEAMLWERHRELSGGAEAGTVPTSPGKVPEDS
LARLLRVLQDLREAHSSSPAGSPPSEPNCLLELQT
>gi|14719829|refINP_127497.1| NACHT, LRR and PYD domains-containing protein 1 isoform 1 [Homo
sapiens], SEQ ID NO: 125
MAGGAWGRLACYLEFLKKEELKEFQLLLANKAHSRSSSGETPAQPEKTSGMEVASYLVAQYGEQRAWDLALHTWEQMGLRSLCAQAQ
EGAGHSPSFPYSPSEPHLGSPSQPTSTAVLMPWIHELPAGCTQGSERRVLRQLPDTSGRRWREISASLLYQALPSSPDHESPSQESPNAPTST
AVLGSWGSPPQPSLAPREQEAPGTQWPLDETSGIYYTEIREREREKSEKGRPPWAAVVGTPPQAHTSLQPHHHPWEPSVRESLCSTWPWK
NEDFNQKFTQLLLLQRPHPRSQDPLVKRSWPDYVEENRGHLIEIRDLFGPGLDTQEPRIVILQGAAGIGKSTLARQVKEAWGRGQLYGDRF
QHVFYFSCRELAQSKVVSLAELIGKDGTATPAPIRQILSRPERLLFILDGVDEPGWVLQEPSSELCLHWSQPQPADALLGSLLGKTILPEASFLI
TARTTALQNLIPSLEQARWVEVLGFSESSRKEYFYRYFTDERQAIRAFRLVKSNKELWALCLVPWVSWLACTCLMQQMKRKEKLTLTSKT
TTTLCLHYLAQALQAQPLGPQLRDLCSLAAEGIWQKKTLFSPDDLRKHGLDGAIISTFLKMGILQEHPIPLSYSFIHLCFQEFFAAMSYVLED
EKGRGKHSNCIIDLEKTLEAYGIHGLFGASTTRFLLGLLSDEGEREMENIFHCRLSQGRNLMQWVPSLQLLLQPHSLESLHCLYETRNKTFLT
QVMAHFEEMGMCVETDMELLVCTFCIKFSRHVKKLQLIEGRQHRSTWSPTMVVLFRWVPVTDAYWQILFSVLKVTRNLKELDLSGNSLS
HSAVKSLCKTLRRPRCLLETLRLAGCGLTAEDCKDLAFGLRANQTLTELDLSFNVLTDAGAKHLCQRLRQPSCKLQRLQLVSCGLTSDCCQ
DLASVLSASPSLKELDLQQNNLDDVGVRLLCEGLRHPACKLIRLGLDQTTLSDEMRQELRALEQEKPQLLIFSRRKPSVMTPTEGLDTGEM
SNSTSSLKRQRLGSERAASHVAQANLKLLDVSKIFPIAEIAEESSPEVVPVELLCVPSPASQGDLHTKPLGTDDDFWGPTGPVATEVVDKEK
NLYRVHFPVAGSYRWPNTGLCFVMREAVTVEIEFCVWDQFLGEINPQHSWMVAGPLLDIKAEPGAVEAVHLPHFVALQGGHVDTSLFQM
AHFKEEGMLLEKPARVELHHIVLENPSFSPLGVLLKMIHNALRFIPVTSVVLLYHRVHPEEVTFHLYLIPSDCSIRKAIDDLEMKFQFVRIHKP
PPLTPLYMGCRYTVSGSGSGMLEILPKELELCYRSPGEDQLFSEFYVGHLGSGIRLQVKDKKDETLVWEALVKPGDLMPATTLIPPARIAVP
SPLDAPQLLHFVDQYREQLIARVTSVEVVLDKLHGQVLSQEQYERVLAENTRPSQMRKLFSLSQSWDRKCKDGLYQALKETHPHLIMEL
WEKGSKKGLLPLSS
>gi|4506179|ref|NP_002777.1| proteasome subunit alpha type-1 isoform 2 [Homo sapiens],
SEQ ID NO: 126
MFRNQYDNDVTVWSPQGRIHQIEYAMEAVKQGSATVGLKSKTHAVLVALKRAQSELAAHQKKILHVDNHIGISIAGLTADARLLCNFMR
QECLDSRFVFDRPLPVSRLVSLIGSKTQIPTQRYGRRPYGVGLLIAGYDDMGPHIFQTCPSANYFDCRAMSIGARSQSARTYLERHMSEFME
CNLNELVKHGLRALRETLPAEQDLTTKNVSIGIVGKDLEFTIYDDDDVSPFLEGLEERPQRKAQPAQPADEPAEKADEPMEH
>gi|4502809|ref|NP_003456.1| chitotriosidase-1 precursor [Homo sapiens], SEQ ID NO: 127
MVRSVAWAGFMVLLMIPWGSAAKLVCYFTNWAQYRQGEARFLPKDLDPSLCTHLIYAFAGMTNHQLSTTEWNDETLYQEFNGLKKMN
PKLKTLLAIGGWNFGTQKFTDMVATANNRQTFVNSAIRFLRKYSFDGLDLDWEYPGSQGSPAVDKERFTTLVQDLANAFQQEAQTSGKE
RLLLSAAVPAGQTYVDAGYEVDKIAQNLDFVNLMAYDFHGSWEKVTGHNSPLYKRQEESGAAASLNVDAAVQQWLQKGTPASKLILGM
PTYGRSFTLASSSDTRVGAPATGSGTPGPFTKEGGMLAYYEVCSWKGATKQRIQDQKVPY1FRDNQWVGFDDVESFKTKVSYLKQKGLG
GAMVWALDLDDFAGFSCNQGRYPLIQTLRQELSLPYLPSGTPELEVPKPGQPSEPEHGPSPGQDTFCQGKADGLYPNPRERSSFYSCAAGR
LFQQSCPTGLVFSNSCKCCTWN
>gi|167614506|ref|NP_002289.2| plastin-2 [Homo sapiens], SEQ ID NO: 128
MARGSVSDEEMMELREAFAKVDTDGNGYISFNELNDLFKAACLPLPGYRVREITENLMATGDLDQDGRISFDEFIKIFHGLKSTDVAKTFR
KAINKKEGICAIGGTSEQSSVGTQHSYSEEEKYAFVNWINKALENDPDCRHVIPMNPNTNDLFNAVGDGIVLCKMINLSVPDTIDERTINKK
KLTPFTIQENLNLALNSASAIGCHVVNIGAEDLKEGKPYLVLGLLWQVIKIGLFADIELSRNEALIALLREGESLEDLMKLSPEELLLRWANY
HLENAGCNKIGNFSTDIKDSKAYYHLLEQVAPKGDEEGVPAVVIDMSGLREKDDIQRAECMLQQAERLGCRQFVTATDVVRGNPKLNLA
FIANLFNRYPALHKPENQDIDWGALEGETREERTFRNWMNSLGVNPRVNHLYSDLSDALVIFQLYEKIKVPVDWNRVNKPPYPKLGGNM
KKLENCNYAVELGKNQAKFSLVGIGGQDLNEGNRTLTLALIWQLMRRYTLNILEEIGGGQKVNDDIIVNWVNETLREAKKSSSISSFKDPKI
STSLPVLDLIDAIQPGSINYDLLKTENLNDDEKLNNAKYAISMARKIGARVYALPEDLVEVNPKMVMTVFACLMGKGMKRV
>gi|148596984|ref|NP_004478.3| Golgin subfamily B member 1 [Homo sapiens], SEQ ID NO: 129
MLSRLSGLANVVLHELSGDDDTDQNMRAPLDPELHQESDMEFNNTTQEDVQERLAYAEQLVVELKDIIRQKDVQLQQKDEALQEERKAA
DNKIKKLKLHAKAKLTSLNKYIEEMKAQGGTVLPTEPQSEEQLSKHDKSSTEEEMEIEKIKHKLQEKEELISTLQAQLTQAQAEQPAQSSTE
MEEFVMMKQQLQEKEEFISTLQAQLSQTQAEQAAQQVVREKDARFETQVRLHEDELLQLVTQADVETEMQQKLRVLQRKLEEHEESLV
GRAQVVDLLQQELTAAEQRNQILSQQLQQMEAEHNTLRNTVETEREESKILLEKMELEVAERKLSFHNLQEEMHHLLEQFEQAGQAQAEL
ESRYSALEQKHKAEMEEKTSHILSLQKTGQELQSACDALKDQNSKLLQDKNEQAVQSAQTIQQLEDQLQQKSKEISQFLNRLPLQQHETAS
QTSFPDVYNEGTQAVTEENIASLQKRVVELENEKGALLLSSIELEELKAENEKLSSQITLLEAQNRTGEADREVSEISIVDIANKRSSSAEESG
QDVLEN'TFSQKHKELSVLLLEMKEAQEEIAFLKLQLQGKRAEEADHEVLDQKEMKQMEGEGIAPIKMKVFLEDTGQDFPLMPNEESSLPA
VEKEQASTEHQSRTSEEISLNDAGVELKSTKQDGDKSLSAVPDIGQCHQDELERLKSQILELELNFHKAQEIYEKNLDEKAKEISNLNQUEE
FKKNADNNSSAFTALSEERDQLLSQVKELSMVTELRAQVKQLEMNLAEAERQRRLDYESQTAHDNLLTEQIHSLSIEAKSKDVKIEVLQNE
LDDVQLQFSEQSTLIRSLQSQLQNKESEVLEGAERVRHISSKVEELSQALSQKELEITKMDQLLLEKKRDVETLQQTIEEKDQQVTEISFSMT
EKMVQLNEEKFSLGVEIKTLKEQLNLLSRAEEAKKEQVEEDNEVSSGLKQNYDEMSPAGQISKEELQHEFDLLKKENEQRKRKLQAALIN
RKELLQRVSRLEEELANLKDESKKEIPLSETERGEVEEDKENKEYSEKCVTSKCQEIEIYLKQTISEKEVELQHIRKDLEEKLAAEEQFQALV
KQMNQTLQDKTNQIDLLQAEISENQAIIQKLITSNTDASDGDSVALVKETVVISPPCTGSSEHWKPELEEKILALEKEKEQLQKKLQEALTSR
KAILKKAQEKERHLREELKQQKDDYNRLQEQFDEQSKENENIGDQLRQLQIQVRESIDGKLPSTDQQESCSSTPGLEEPLFKATEQHHTQP
VLESNLCPDWPSHSEDASALQGGTSVAQIKAQLKEIEAEKVELELKVSSTTSELTKKSEEVFQLQEQINKQGLEIESLKTVSHEAEVHAESLQ
QKLESSQLQIAGLEHLRELQPKLDELQKLISKKEEDVSYLSGQLSEKEAALTKIQTEBEQEDLIKALHTQLEMQAKEHDERIKQLQVELCEM
KQKPEEIGEESRAKQQIQRKLQAALISRKEALKENKSLQEELSLARGTIERLTKSLADVESQVSAQNKEKDTVLGRLALLQEERDKLITEMD
RSLLENQSLSSSCESLKLALEGLTEDKEKLVKEIESLKSSKIAESTEWQEKHKELQKEYEILLQSYENVSNEAERIQHVVEAVRQEKQELYGK
LRSTEANKKETEKQLQEAEQEMEEMKEKMRKFAKSKQQKILELEEENDRLRAEVHPAGDTAKECMETLLSSNASMKEELERVKMEYETL
SKKFQSLMSEKDSLSEEVQDLKHQIEGNVSKQANLEATEKHDNQTNVTEEGTQSIPGETEEQDSLSMSTRPTCSESVPSAKSANPAVSKDF
SSHDEINNYLQQIDQLKERIAGLEEEKQKNKEFSQTLENEKNTLLSQISTKDGELKMLQEEVTKMNLLNQQIQEELSRVTKLKETAEEEKDD
LEERLMNQLAELNGSIGNYCQDVTDAQIKNELLESEMKNLKKCVSELEEEKQQLVKEKTKVESEIRKEYLEKIQGAQKEPGNKSHAKELQ
ELLKEKQQEVKQLQKDCIRYQEKISALERTVKALEFVQTESQKDLEITKENLAQAVEHRKKAQAELASFKVLLDDTQSEAARVLADNLKL
KKELQSNKESVKSQMKQKDEDLERRLEQAEEKHLKEKKNMQEKLDALRREKVHLEETIGEIQVTLNKKDKEVQQLQENLDSTVTQLAAF
TKSMSSLQDDRDRVIDEAKKWERKFSDAIQSKEEEIRLKEDNCSVLKDQLRQMSIHMEELKINISRLEHDKQIWESKAQTEVQLQQKVCDT
LQGENKELLSQLEETRHLYHSSQNELAKLESELKSLKDQLTDLSNSLEKCKEQKGNLEGIIRQQEADIQNSKFSYEQLETDLQASRELTSRLH
EEINMKEQKIISLLSGKEEAIQVAIAELRQQHDKEIKELENLLSQEEEENIVLEEENKKAVDKTNQLMETLKTIKKENIQQKAQLDSFVKSMS
SLQNDRDRIVGDYQQLEERHLSBLEKDQLIQEAAAENNKLKEEIRGLRSHMDDLNSENAKLDAELIQYREDLNQVITIKDSQQKQLLEVQL
QQNKELENKYAKLEEKLKESEEANEDLRRSFNALQEEKQDLSKEIESLKVSISQLTRQVTALQEEGTLGLYHAQLKVKEEEVHRLSALFSSS
QKRIAELEEELVCVQKEAAKKVGEIEDKLKKELKHLHHDAGIMRNETETAEERVAELARDLVEMEQKLLMVTKENKGLTAQIQSFGRSMS
SLQNSRDHANEELDELKRKYDASLKELAQLKEQGLLNRERDALLSETAFSMNSTEENSLSHLEKLNQQLLSKDEQLLHLSSQLEDSYNQV
QSFSKAMASLQNERDHLWNELEKFRKSEEGKQRSAAQPSTSPAEVQSLKKAMSSLQNDRDRLLKELKNLQQQYLQINQEITELHPLKAQL
QEYQDKTKAFQINIQEELRQENLSWQHELHQLRMEKSSWEIHERRMKEQYLMAISDKDQQLSHLQNLIRELRSSSSQTQPLKVQYQRQAS
PETSASPDGSQNLVYETELLRTQLNDSLKEIHQKELRIQQLNSNFSQLLEEKNTLSIQLCDTSQSLRENQQHYGDLLNHCAVLEKQVQELQA
GPLNIDVAPGAPQEKNGVHRKSDPEELREPQQSFSEAQQQLCNTRQEVNELRKLLEEERDQRVAAENALSVAEEQIRRLEHSEWDSSRTPII
GSCGTQEQALLIDLTSNSCRRTRSGVGWKRVLRSLCHSRTRVPLLAAIYFLMIHVLLILCFTGHL
>gi|11386161|ref|NP_001843.1| collagen alpha-2(IX) chain precursor [Homo sapiens], SEQ ID NO: 130
MAAATASPRSLLVLLQVVVLALAQIRGPPGERGPPGPPGPPGVPGSDGIDGDNGPPGKAGPPGPKGEPGKAGPDGPDGKPGIDGLTGAKGE
PGPMGIPGVKGQPGLPGPPGLPGPGFAGPPGPPGPVGLPGEIGIRGPKGDPGPDGPSGPPGPPGKPGRPGTIQGLEGSADFLCPTNCPPGMKG
PPGLQGVKGHAGKRGILGDPGHQGKPGPKGDVGASGEQGIPGPPGPQGIRGYPGMAGPKGETGPHGYKGMVGAIGATGPPGEEGPRGPP
GRAGEKGDEGSPGIRGPQGITGPKGATGPPGINGKDGTPGTPGMKGSAGQAGQPGSPGHQGLAGVPGQPGTKGGPGDQGEPGPQGLPGFS
GPPGKEGEPGPRGEIGPQGIMGQKGDQGERGPVGQPGPQGRQGPKGEQGPPGIPGPQGLPGVKGDKGSPGKTGPRGKVGDPGVAGLPGE
KGEKGESGEPGPKGQQGVRGEPGYPGPSGDAGAPGVQGYPGPPGPRGLAGNRGVPGQPGRQGVEGRDATDQHIVDVALKMLQEQLAEV
AVSAKREALGAVGMMGPPGPPGPPGYPGKQGPHGHPGPRGVPGIVGAVGQIGNTGPKGKRGEKGDPGEVGRGHPGMPGPPGIPGLPGRP
GQAINGKDGDRGSPGAPGEAGRPGLPGPVGLPGFCEPAACLGASAYASARLTEPGSIKGP
>gi|300797277|ref|NP_705932.2| sodium/potassium/calcium exchanger 4 isoform 1 precursor [Homo
sapiens], SEQ ID NO: 131
MALRGTLRPLKVRRRREMLPQQVGFVCAVLALVCCASGLFGSLGHKTASASKRVLPDTWRNRKLMAPVNGTQTAKNCTDPAIHEFPTDL
FSNKERQHGAVLLHILGALYMFYALAIVCDDFFVPSLEKICERLHLSEDVAGATFMAAGSSTPELFASVIGVFITHGDVGVGTIVGSAVFNIL
CIIGVCGLFAGQVVRLTWWAVCRDSVYYTISVIVLIVFIYDEQIVWWEGLVLIILYVFYILIMKYNVKMQAFFTVKQKSIANGNPVNSELEA
GNDFYDGSYDDPSVPLLGQVKEKPQYGKNPVVMVDEIMSSSPPKFTFPEAGLRIMITNKFGPRTRLRMASRIIINERQRLINSANGVSSKPLQ
NGRHENIENGNVPVENPEDPQQNQEQQPPPQPPPPEPEPVEADFLSPFSVPEARGDKVKWVFTWPLIFLLCVTIPNCSKPRWEKFFMVTFIT
ATLWIAVFSYIMVWLVTIIGYTLGIPDVIMGITFLAAGTSVPDCMASLIVARQGLGDMAVSNTIGSNVFDILVGLGVPWGLQTMVVNYGST
VKINSRGLVYSVVLLLGSVALTVLGIHLNKWRLDRKLGVYVLVLYAIFLCFSIMIEFNVFTFVNLPMCREDD
>gi|41281583|ref|NP_056031.2| inositol hexakisphosphate and diphosphoinositol-pentakisphosphate
kinase 2 [Homo sapiens], SEQ ID NO: 132
MSEAPRFFVGPEDTEINP_GNYRHFFHHADEDDEEEDDSPPERQIVVGICSMAKKSKSKPMKEILERISLFKYITVVVFEEEVILNEPVENWPL
CDCLISFHSKGFPLDKAVAYAKLRNPFVINDLNMQYLIQDRREVYSILQAEGILLPRYAILNRDPNNPKECNLIEGEDHVEVNGEVFQKPFV
EKPVSAEDHNVYIYYPTSAGGGSQRLFRKIGSRSSVYSPESNVRKTGSYIYEEFMPTDGTDVKVYTVGPDYAHAEARKSPALDGKVERDS
EGKEVRYPVILNAREKLIAWKVCLAFKQTVCGFDLLRANGQSYVCDVNGFSFVKNSMKYYDDCAKILGNIVMRELAPQFHIPWSIPLEAE
DIPIVPTTSGTMMELRCVIAVIRHGDRTPKQKMKMEVRHQKFFDLFEKCDGYKSGKLKLKKPKQLQEVLDIARQLLMELGQNNDSEIEEN
KPKLEQLKTVLEMYGHFSGINRKVQLTYLPHGCPKTSSEEEDSRREEPSLLLVLKWGGELTPAGRVQAEELGRAFRCMYPGGQGDYAGFP
GCGLLRLHSTYRHDLKIYASDEGRVQMTAAAFAKGLLALEGELTPILVQMVKSANMNGLLDSDSDSLSSCQQRVKARLHEILQKDRDFTA
EDYEKLTPSGSISLIKSMHLIKNPVKTCDKVYSLIQSLTSQIRHRMEDPKSSDIQLYHSETLELMLRRWSKLEKDFKTKNGRYDISKIPDIYDC
IKYDVQHNGSLKLENTMELYRLSKALADIVIPQEYGITKAEKLEIAKGYCTPLVRKIRSDLQRTQDDDTVNKLHPVYSRGVLSPERHVRTRL
YFTSESHVHSLLSILRYGALCNESKDEQWKRAMDYLNVVNELNYMTQIVIMLYEDPNKDLSSEERFHVELHFSPGAKGCEEDKNLPSGY
GYRPASRENEGRRPFKIDNDDEPHTSKRDEVDRAVILFKPMVSEPIHIHRKSPLPRSRKTATNDEESPLSVSSPEGTGTWLHYTSGVGTGRR
RRRSGEQITSSPVSPKSLAFTSSIFGSWQQVVSENANYLRTPRTLVEQKQNPTVGSHCAGLFSTSVLGGSSSAPNLQDYARTHRKKLTSSGCI
DGFELYSMVPSICPLETLHNALSLKQVDEFLASIASPSSDVPRKTAEISSTALRSSPIMRKKVSLNTYTPAKILPTPPATLKSTKASSKPATSGP
SSAVVPNTSSRKKNITSKTETHEHKKNTGKKK
>gi|8659574|ref|NP_006512.2| transcription factor E3 [Homo sapiens], SEQ ID NO: 133
MSHAAEPARDGVEASAEGPRAVFVLLEERRPADSAQLLSLNSLLPESGIVADIELENVLDPDSFYELKSQPLPLRSSLPISLQATPATPATLSA
SSSAGGSRTPAMSSSSSSRVLLRQQLMRAQAQEQERRERREQAAAAPFPSPAPASPAISVVGVSAGGHTLSRPPPAQVPREVLKVQTHLEN
PTRYHLQQARRQQVKQYLSTTLGPKLASQALTPPPGPASAQPLPAPEAAHTTGPTGSAPNSPMALLTIGSSSEKEIDDVIDEIISLESSYNDE
MLSYLPGGTTGLQLPSTLPVSGNLLDVYSSQGVATPAITVSNSCPAELPNIKREISETEAKALLKERQKKDNHNLIERRRRFNINDRIKELGTL
IPKSSDPEMRWNKGTILKASVDYIRKLQKEQQRSKDLESRQRSLEQANRSLQLRIQELELQAQIHGLPVPPTPGLLSLATTSASDSLKPEQLDI
EEEGRPGAATFHVGGGPAQNAPHQQPPAPPSDALLDLHFPSDHLGDLGDPFHLGLEDILMEEEEGVVGGLSGGALSPLRAASDPLLSSVSP
AVSKASSRRSSFSMEEES
>gi|256600202|ref|NP_001157861.1| rap guanine nucleotide exchange factor 6 isoform 5
[Homo sapiens], SEQ ID NO: 134
MNSPVDPGARQALRKKPPERTPEDLNTIYSYLHGMEILSNLREHQLRLMSARARYERYSGNQVLFCSETIARCWYILLSGSVLVKGSMVLP
PCSFGKQFGGKRGCDCLVLEPSEMIVVENAKDNEDSILQREIPARQSRRRFRKINYKGERQTITDDVEVNSYLSLPADLTKMHLTENPHPQV
THVSSSQSGCSIASDSGSSSLSDIYQATESEVGDVDLTRLPEGPVDSEDDEEEDEEIDRTDPLQGRDLVRECLEKEPADKTDDDIEQLLEFMH
QLPAFANMTMSVRRELCSVMIFEVVEQAGAIILEDGQELDSWYVILNGTVEISHPDGKVENLFMGNSFGITPTLDKQYMHGIVRTKVDDCQ
FVCIAQQDYWRILNHVEKNTHKVEEEGEIVMVHEHRELDRSGTRKGHIVIKATPERLIMHLIEEHSIVDPTYIEDFLLTYRTFLESPLDVGIKL
LEWFKIDSLRDKVTRIVLLWVNNHFNDFEGDPAMTRFLEEFEKNLEDTKMNGHLRLLNIACAAKAKWRQVVLQKASRESPLQFSLNGGSE
KGFGIFVEGVEPGSKAADSGLKRGDQINEVNGQNFENITFMKAVEILRNNTHLALTVKTNIFVFKELLFRTEQEKSGVPHIPKIAEKKSNRHS
IQHVPGDIEQTSQEKGSKKVKANTVSGGRNKIRKILDKTRFSILPPKLFSDGGLSQSQDDSIVGTRHCRHSLAIMPIPGTLSSSSPDLLQPTTS
MLDFSNPSDIPDQVIRVFKVDQQSCYIIISKDTTAKEVVFHAVHEFGLTGASDTYSLCEVSVTPEGVIKQRRLPDQFSKLADRIQLNGRYYLK
NNMETETLCSDEDAQELVKESQLSMLQLSTIEVATQLSMRDFDLFRNIEPTEYIDDLFKLNSKTGNTHLKRFEDIVNQETFWVASEILTEAN
QLKRMKIIKHFIKIALHCRECKNFNSMFAIISGLNLASVARLRGTWEKLPSKYEKHLQDLQDIFDPSRNMAKYRNILSSQSMQPPIIPLFPVVK
KDMTFLHEGNDSKVDGLVNFEKLRMISKEIRQVVRMTSANMDPAMMFRQRSLSQGSTNSNMLDVQGGAHKKRARRSSLLNAKKLYED
AQMARKVKQYLSSLDVETDEEKFQMMSLQWEPAYGTLTKNLSEKRSAKSSEMSPVPMRSAGQTTKAHLHQPHRVSQVLQVPAVNLH
PIRKKGQTKDPALNTSLPQKVLGTTEEISGKKHTEDTISVASSLHSSPPASPQGSPHKVGSIISDHSSKISGQSCPGIGGAYLQKKILQITRSTA
KRTDSTEKATEENRDRTSCENTTRKRMTSPFRRLRERMLSRERLVNSQKEDTDHNQATESCEKVKDVGSNIKDEKGSAIFNSNSQGNSNT
LNCFYTRFKSKRRKTL
>gi|38016945|ref|NP_066288.2| deformed epidermal autoregulatory factor 1 homolog [Homo sapiens],
SEQ ID NO: 135
MEDSDSAAKQLGLAEAAAVAAAAAVAAAAAAAAGGEAEEPVLSRDEDSEEDADSEAERETPRVTAVAVMAAEPGHMDMGAEALPGPD
EAAAAAAFAEVTTVTVANVGAAADNVFTTSVANAASISGHVLSGRTALQIGDSLNTEKATLIVVHTDGSIVETTGLKGPAAPLTPGPQSPPT
PLAPGQEKGGTKYNWDPSVYDSELPVRCRNISGTLYKNRLGSGGRGRCIKQGENWYSPTEFEAMAGRASSKDWKRSIRYAGRPLQCLIQD
GILNPHAASCTCAACCDDMTLSGPVRLFVPYKRRKKENELPTTPVKKDSPKNITLLPATAATTFTVTPSGQITTSGALTFDRASTVEATAVIS
ESPAQGDVFAGATVQEASVQPPCRASHPEPHYPGYQDSCQIAPFPEAALPTSHPKIVLTSLPALAVPPPTPTKAAPPALVNGLELSEPRSWL
YLEEMVNSLLNTAQQLKTLFEQAKHASTYREAATNQAKIFIADAERKEQSCVNCGREAMSECTGCHKVNYCSTFCQRKDWKDHQHICGQ
SAAVTVQADEVHVAESVMEKVTV
>gi|28558973|ref|NP_004220.2| mediator of RNA polymerase II transcription subunit 14 [Homo
sapiens], SEQ ID NO: 136
MAPVQLENHQLVPPGGGGGGSGGPPSAPAPPPPGAAVAAAAAAAASPGYRLSTLIEFLLHRAYSELMVLTDLLPRKSDVERKIEIVQFASR
TRQLFVRLLALVKWANNAGKVEKCAMISSFLDQQAILFVDTADRLASLARDALVHARLPSFAIPYAIDVLTTGSYPRLPTCIRDKIIPPDPITK
IEKQATLHQLNQILRHRLVTTDLPPQLANLTVANGRVKFRVEGEFEATLTVMGDDPDVPWRLLKLEILVEDKETGDGRALVHSMQISFIHQ
LVQSRLFADEKPLQDMYNCLHSFCLSLQLEVLHSQTLMLIRERWGDLVQVERYHAGKCLSLSVWNQQVLGRKTGTASVHKVTIKIDEND
VSKPLQIFHDPPLPASDSKLVERAMKIDHLSIEKLLIDSVHARAHQKLQELKAILRGFNANENSSIETALPALVVPILEPCGNSECLHIFVDLHS
GMFQLMLYGLDQATLDDMEKSVNDDMKRIIPWIQQLKFWLGQQRCKQSIKHLPTISSETLQLSNYSTHPIGNLSKNKLFIKLTRLPQYYIVV
EMLEVPNKPTQLSYKYYFMSVNAADREDSPAMALLLQQFKENIQDLVFRTKTGKQTRTNAKRKLSDDPCPVESKKTKRAGEMCAFNKV
LAHFVAMCDTNMPFVGLRLELSNLEIPHQGVQVEGDGFSHAIRLLKIPPCKGITEETQKALDRSLLDCTFRLQGRNNRTWVAELVFANCPL
NGTSTREQGPSRHVYLTYENLLSEPVGGRKVVEMFLNDWNSIARLYECVLEFARSLPDIPAHLNIFSEVRVYNYRKLILCYGTTKGSSISIQ
WNSIHQKFHISLGTVGPNSGCSNCHNTILHQLQEMFNKTPNVVQLLQVLFDTQAPLNAINKLPTVPMLGLTQRTNTAYQCFSILPQSSTHIR
LAFRNMYCIDIYCRSRGVVAIRDGAYSLFDNSKLVEGFYPAPGLKTFLNMFVDSNQDARRRSVNEDDNPPSPIGGDMMDSLISQLQPPPQQ
QPFPKQPGTSGAYPLTSPPTSYHSTVNQSPSMMHTQSPGNLHAASSPSGALRAPSPASFVPTPPPSSHGISIGPGASFASPHGTLDPSSPYTM
VSPSGRAGNWPGSPQVSGPSPAARMPGMSPANPSLHSPVPDASHSPRAGTSSQTMPTNMPPPRKLPQRSWAASIPTILTHSALNILLLPSPTP
GLVPGLAGSYLCSPLERFLGSVIMRRHLQRIIQQETLQLINSNEPGVIMFKTDALKCRVALSPKTNQTLQLKVTPENAGQWKPDELQVLEKF
FETRVAGPPFKANTLIAFTKLLGAPTHILRDCVHIMKLELFPDQATQLKWNVQFCLTIPPSAPPIAPPGTPAVVLKSKMLFFLQLTQKTSVPPQ
EPVSIIVPIIYDMASGTTQQADIPRQQNSSVAAPMMVSNILKRFAEMNPPRQGECTIFAAVRDLMANLTLPPGGRP
>gi|38146094|ref|NP_005472.2| mediator of RNA polymerase II transcription subunit 16 [Homo
sapiens], SEQ ID NO: 137
MCDLRRPAAGGMMDLAYVCEWEKWSKSTHCPSVPLACAWSCRNLIAFTMDLRSDDQDLTRMIHILDTEHPWDLHSIPSEHHEAITCLEW
DQSGSRLLSADADGQIKCWSMADHLANSWESSVGSLVEGDPIVALSWLHNGVKLALHVEKSGASSFGEKFSRVKFSPSLTLFGGKPMEG
WIAVTVSGLVTVSLLKPSGQVLTSTESLCRLRGRVALADIAFTGGGNIVVATADGSSASPVQFYKVCVSVVSEKCRIDTEILPSLFMRCTTDL
NRKDKFPAITHLKFLARDMSEQVLLCASSQTSSIVECWSLRKEGLPVNNIFQQISPVVGDKQPTILKWRILSATNDLDRVSAVALPKLPISLT
NTDLKVASDTQFYPGLGLALAFHDGSVHIVHRLSLQTMAVFYSSAAPRPVDEPAMKRPRTAGPAVHLKAMQLSWTSLALVGIDSHGKLS
VLRLSPSMGHPLEVGLALRHLLFLLEYCMVTGYDWWDILLHVQPSMVQSLVEKLHEEYTRQTAALQQVLSTRILAMKASLCKLSPCTVTR
VCDYHTKLFLIAISSTLKSLLRPHFLNTPDKSPGDRLTEICTKITDVDIDKVMINLKTEEFVLDMNTLQALQQLLQWVGDFVLYLLASLPNQG
SLLRPGHSFLRDGTSLGMLRELMVVIRIWGLLKPSCLPVYTATSDTQDSMSLLFRLLTKLWICCRDEGPASEPDEALVDECCLLPSQLLIPSL
DWLPASDGLVSRLQPKQPLRLQFGRAPTLPGSAATLQLDGLARAPGQPKIDHLRRLHLGACPTEECKACTRCGCVTMLKSPNRTTAVKQW
EQRWIKNCLAVEGRGPDACVTSRASEEAPAFVQLGPQSTHHSPRTPRSLDHLHPEDRP
>gi|116063554|ref|NP_057038.2| putative deoxyribose-phosphate aldolase [Homo sapiens],
SEQ ID NO: 138
MSAHNRGTELDLSWISKIQVNHPAVLRRAEQIQARRTVKKEWQAAWLLKAVTFIDLTTLSGDDTSSNIQRLCYKAKYPIREDLLKALNMH
DKGITTAAVCVYPARVCDAVKALKAAGCNIPVASVAAGFPAGQTHLKTRLEEIRLAVEDGATEIDVVINRSLVLTGQWEALYDEIRQFRKA
CGEAHLKTILATGELGTLTNVYKASMIAMMAGSDFIKTSTGKETVNATFPVAIVMLRAIRDFFWKTGNKIGFKPAGGIRSAKDSLAWLSLV
KEELGDEWLKPELFRIGASTLLSDIERQIYHHVTGRYAAYHDLPMS
>gi|4758668|ref|NP_004854.1| serine palmitoyltransferase 2 [Homo sapiens], SEQ ID NO: 139
MRPEPGGCCCRRTVRANGCVANGEVRNGYVRSSAAAAAAAAAGQIHHVTQNGGLYKRPFNEAFEETPMLVAVLTYVGYGVLTLFGYLR
DFLRYWRIEKCHHATEREEQKDFVSLYQDFENFYTRNLYMRIRDNWNRPICSVPGARVDIMERQSHDYNWSFKYTGNIIKGVINMGSYN
YLGFARNTGSCQEAAAKVLEEYGAGVCSTRQEIGNLDKHEELEELVARFLGVEAAMAYGMGFATNSMNIPALVGKGCLILSDELNHASLV
LGARLSGATIRIFKHNNMQSLEKLLKDAIVYGQPRTRRPWKKILILVEGIYSMEGSIVRLPEVIALKKKYKAYLYLDEAHSIGALGPTGRGVV
EYFGLDPEDVDVMMGTFTKSFGASGGYIGGKKELIDYLRTHSHSAVYATSLSPPVVEQIITSMKCIMGQDGTSLGKECVQQLAENTRYFRR
RLKEMGFIIYGNEDSPVVPLMLYMPAKIGAFGREMLKRNIGVVVVGFPATPIIESRARFCLSAAHTKEILDTALKEIDEVGDLLQLKYSRHRL
VPLLDRPFDETTYEETED
>gi|7705935|ref|NP_057415.1| zinc finger protein 639 [Homo sapiens], SEQ ID NO: 140
MNEYPKKRKRKTLHPSRYSDSSGISRIADGFNGIFSDHCYSVCSMRQPDLKYFDNKDDDSDTETSNDLPKFADGIKARNRNQNYLVPSPVL
RILDHTAFSTEKSADIVICDEECDSPESVNQQTQEESPIEVHTAEDVPIAVEVHAISEDYDIETENNSSESLQDQTDEEPPAKLCKILDKSQAL
NVTAQQKWPLLRANSSGLYKCELCEFNSKYFSDLKQHMILKHKRTDSNVCRVCKESFSTNMLLIEHAKLHEEDPYICKYCDYKTVIFENLS
QHIADTHFSDHLYWCEQCDVQFSSSSELYLHFQEHSCDEQYLCQFCEHETNDPEDLHSHVVNEHACKLIELSDKYNNGEHGQYSLLSKITF
DKCKNFFVCQVCGFRSRLHTNVNRHVAIEHTKIFPHVCDDCGKGFSSMLEYCKHLNSHLSEGIYLCQYCEYSTGQIEDLKIFILDFKHSADL
PHKCSDCLMRFGNERELISHLPVHETT
>gi|304555614|ref|NP_689956.2| BRCA1-associated ATM activator 1 [Homo sapiens], SEQ ID NO: 141
MDPECAQLLPALCAVLVDPRQPVADDTCLEKLLDWFKTVTEGESSVVLLQEHPCLVELLSHVLKVQDLSSGVLSFSLRLAGTFAAQENCF
QYLQQGELLPGLFGEPGPLGRATWAVPTVRSGWIQGLRSLAQHPSALRFLADHGAVDTIFSLQGDSSLFVASAASQLLVHVLALSMRGGA
EGQPCLPGGDWPACAQKIMDHVEESLCSAATPKVTQALNVLTTTFGRCQSPWTEALWVRLSPRVACLLERDPIPAAHSFVDLLLCVARSP
VFSSSDGSLWETVARALSCLGPTHMGPLALGILKLEHCPQALRTQAFQVLLQPLACVLKATVQAPGPPGLLDGTADDATTVDTLLASKSSC
AGLLCRTLAHLEELQPLPQRPSPWPQASLLGATVTVLRLCDGSAAPASSVGGHLCGTLAGCVRVQRAALDFLGTLSQGTGPQELVTQALA
VLLECLESPGSSPTVLKKAFQATLRWLLSSPKTPGCSDLGPLIPQFLRELFPVLQKRLCHPCWEVRDSALEFLTQLSRHWGGQADFRCALLA
SEVPQLALQLLQDPESYVRASAVTAMGQLSSQGLHAPTSPEHAEARQSLFLELLHILSVDSEGFPRRAVMQVFTEWLRDGHADAAQDTEQ
FVATVLQAASRDLDWEVRAQGLELALVFLGQTLGPPRTHCPYAVALPEVAPAQPLTEALRALCHVGLFDFAFCALFDCDRPVAQKSCDLL
LFLRDKIASYSSLREARGSPNTASAEATLPRWRAGEQAQPPGDQEPEAVLAMLRSLDLEGLRSTLAESSDHVEKSPQSLLQDMLATGGFLQ
GDEADCY
>gi|89111122|ref|NP_001034750.1| toll/interleukin-1 receptor domain-containing adapter protein
isoform a [Homo sapiens], SEQ ID NO: 142
MASSTSLPAPGSRPKKPLGKMADWFRQTLLKKPKKRPNSPESTSSDASQPTSQDSPLPPSLSSVTSPSLPPTHASDSGSSRWSKDYDVCVCH
SEEDLVAAQDLVSYLEGSTASLRCFLQLRDATPGGAIVSELCQALSSSHCRVLLITPGFLQDPWCKYQMLQALTEAPGAEGCTIPLLSGLSR
AAYPPELRFMYYVDGRGPDGGFRQVKEAVMRYLQTLS

1-17. (canceled)

18. A method for determining disease progression in a subject after a stroke, comprising:
(a) measuring the level of one or more biomarkers in a first sample obtained from the subject at a first time point;
(b) measuring the level of the one or more biomarkers in a second sample obtained from the subject at a second time point;
(c) comparing the level of the one or more biomarkers at the first time point to the level of the one or more biomarkers at the second time point; and
(d) determining the disease progression between the first and the second time point based on the result of step (c),
wherein the one or more biomarkers at the second time point; and (d) determining the disease progression between the first and the second time point based on the result of step (c), wherein the one or more biomarkers comprise gene products expressed from genes selected from the group consisting of IL-1α, IL-1β, IL-1ra, IL-3, IL-2, IL-4, IL-5, IL-6, IL-7, IL-8, IL-9, IL-10, IL-12 (p40), IL-12(p70), IL-13, IL-15, IL-17, EGF, Eotaxin, FGF-2, FTL-3 ligand, Fractalkine, G-CSF, GM-CSF, GRO, IFN-α2, IFN-γ, IP-10, MCP-1, MCP-3, MCD, MIP-1α, MIP-1β, PDGF-aa, PGDF-aa bb, RANTES, sCD40L, sIL2-rα, TNF-α, TNF-β, VEGF and genes listed in Tables 4, 5, 6 and 8.

19. A method for determining the efficacy of a treatment for stroke in a subject, comprising:
(a) measuring the level of one or more biomarkers in a first sample obtained from the subject at a first time point;
(b) measuring the level of the one or more biomarkers in a second sample obtained from the subject at a second time point, wherein the subject is under treatment at the second time point;
(c) comparing the level of the one or more biomarkers at the first time point to the level of the one or more biomarkers at the second time point; and
(d) determining the efficacy of the treatment based on the result of step (c),
wherein the one or more biomarkers comprise gene products expressed from genes selected from the group consisting of IL-1α, IL-1β, IL-1ra, IL-3, IL-2, IL-4, IL-5, IL-6, IL-7, IL-8, IL-9, IL-10, IL-12 (p40), IL-12(p70), IL-13, IL-15, IL-17, EGF, Eotaxin, FGF-2, FTL-3 ligand, Fractalkine, G-CSF, GM-CSF, GRO, IFN-α2, IFN-γ, IP-10, MCP-1, MCP-3, MCD, MIP-1α, MIP-1β, PDGF-aa, PGDF-aa bb, RANTES, sCD40L, sIL2-rα, TNF-α, TNF-β, VEGF, NMDA receptor, neuronal specific enolase, GFAP, Apo C-III, MMP-9, D-dimer, CRP, brain natriuretic peptide, S100B and genes listed in Tables 4, 5, 6 and 8.

20. A kit for detecting biomarkers for stroke in a biological sample, comprising:
(a) reagents for detecting a panel of biomarkers for stroke, and
(b) a instruction listing the reference range for each of the biomarkers,
wherein the panel of biomarkers comprise two or more biomarkers, and wherein the two or more biomarkers comprise gene products expressed from genes selected from the group consisting of IL-1α, IL-1β, IL-1ra, IL-3, IL-2, IL-4, IL-5, IL-6, IL-7, IL-8, IL-9, IL-10, IL-12 (p40), IL-12(p70), IL-13, IL-15, IL-17, EGF, Eotaxin, FGF-2, FTL-3 ligand, Fractalkine, G-CSF, GM-CSF, GRO, IFN-α2, IFN-γ, IP-10, MCP-1, MCP-3, MCD, MIP-1α, MIP-1β, PDGF-aa, PGDF-aa bb, RANTES, sCD40L, sIL2-rα, TNF-α, TNF-β, VEGF, NMDA receptor, neuronal specific enolase, GFAP, Apo C-III, MMP-9, D-dimer, CRP, brain natriuretic peptide, S100B and genes listed in Tables 4, 5, 6 and 8.

21. The method of claim 1, wherein the one or more biomarkers are polynucleotides.

22. The method of claim 1, wherein the one or more biomarkers are peptides

23. The method of claim 1, wherein step (a) includes measuring a panel of three or more biomarkers in the sample from the subject.

24. The method of claim 23, wherein the three or more biomarkers comprise expression product of at least one gene listed in Table 4, at least one gene listed in Table 5 and at least one gene listed in Table 6.

25. The method of claim 18, wherein step (a) includes measuring a panel of six or more biomarkers in the sample from the subject.

26. The method of claim 25, wherein the six or more biomarkers comprise expression product of at least two genes listed in Table 4, at least two genes listed in Table 5 and at least two genes listed in Table 6.

27. The method of claim 18, wherein step (a) includes measuring a panel of nine or more biomarkers in the sample from the subject.

28. The method of claim 27, wherein the nine or more biomarkers comprise expression product of at least three genes listed in Table 4, at least three genes listed in Table 5 and at least three genes listed in Table 6.

29. The method of claim 18, wherein step (a) includes measuring a panel of twenty or more biomarkers in the sample from the subject.

30. The method of claim 18 further comprising step (c) making a diagnosis based on the result of said comparing step (b).

31. The method of claim 18, wherein the sample is a body fluid sample or a tissue sample.

32. The method of claim 31, wherein the body fluid sample is a blood sample.

33. The method of claim 31, wherein the body fluid sample is a plasma or serum sample.

34. The method of claim 31, wherein the body fluid sample is a cerebrospinal fluid sample.

35. The method of claim 31, wherein the sample is peripheral blood mononuclear cells (PBMCs).

The application's sequence listing, which the Patent Office published only in electronic form, follows.

SEQUENCE LISTING (142 sequences)

SEQ ID NO: 1 - protein, 198 aa, Homo sapiens
MKLYSLSVLYKGEAKVVLLKAAYDVSSFSFFQRSSVQEFMTFTSQLIVERSSKGTRASVKEQDYLCHVYVRNDSLAGVVIADNEYPSRVAFTLLEKVLDEFSKQVDRIDWPVGSPATIHYPALDGHLSRYQNPREADPMTKVQAELDETKIILHNTMESLLERGEKLDDLVSKSEVLGTQSKAFYKTARKQNSCCAIM

SEQ ID NO: 2 - protein, 146 aa, Homo sapiens [sequence omitted]

SEQ ID NO: 3 - protein, 478 aa, Homo sapiens
MAGAGERKGKKDDNGIGTAIDFVLSNARLVLGVGGAAMLGIATLAVKRMYDRAISAPTSPTRLSHSGKRSWEEPNWMGSPRLLNRDMKTGLSRSLQTLPTDSSTFDTDTFCPPRPKPVARKGQVDLKKSRLRMSLQEKLLTYYRNRAAIPAGEQARAKQAAVDICAELRSFLRAKLPDMPLRDMYLSGSLYDDLQVVTADHIQLIVPLVLEQNLWSCIPGEDTIMNVPGFFLVRRENPEYFPRGSSYWDRCVVGGYLSPKTVADTFEKVVAGSINWPAIGSLLDYVIRPAPPPEALTLEVQYERDKHLFIDFLPSVTLGDTVLVAKPHRLAQYDNLWRLSLRPAETARLRALDQADSGCRSLCLKILKAICKSTPALGHLTASQLTNVILHLAQEEADWSPDMLADRFLQALRGLISYLEAGVLPSALNPKDKALKERSLRHQVRMMEVDSRLNVSWKIQSLVGVWWPCFLPRQALLF

SEQ ID NO: 4 - protein, 1455 aa, Homo sapiens [sequence omitted]

SEQ ID NO: 5 - protein, 415 aa, Homo sapiens
MNFSEVFKLSSLLCKFSPDGKYLASCVQYRLVVRDVNTLQILQLYTCLDQIQHIEWSADSLFILCAMYKRGLVQVWSLEQPEWHCKIDEGSAGLVASCWSPDGRHILNTTEFHLRITVWSLCTKSVSYIKYPKACLQGITFTRDGRYMALAERRDCKDYVSIFVCSDWQLLRHFDTDTQDLTGIEWAPNGCVLAVWDTCLEVRILNHVTWKMITEFGHPAAINDPKIVVYKEAEKSPQLGLGCLSFPPPRAGAGPLPSSESKYEIASVPVSLQTLKPVTDRANPKIGIGMLAFSPDSYFLATRNDNIPNAVWVWDIQKLRLFAVLEQLSPVRAFQWDPQQPRLAICTGGSRLYLWSPAGCMSVQVPGEGDFAVLSLCWHLSGDSMALLSKDHFCLCFLETEAVVGTACRQLGGHT

SEQ ID NO: 6 - protein, 733 aa, Homo sapiens
MSNVSEERRKRQQNIKEGLQFIQSPLSYPGTQEQYAVYLRALVRNLFNEGNDVYREHDWNNSISQYTEALNIADYAKSEEILIPKEIIEKLYINRIACYSNMGFHDKVLEDCNIVLSLNASNCKALYRKSKALSDLGRYKKAYDAVAKCSLAVPQDEHVIKLTQELAQKLGFKIRKAYVRAELSLKSVPGDGATKALNHSVEDIEPDLLTPRQEAVPVVSLPAPSFSHEVGSELASVPVMPLTSILPLQVEESALPSAVLANGGKMPFTMPEAFLDDGDMVLGDELDDLLDSAPETNETVMMNGPGSLFASENFLGISSQPRNDFGNFFGSAVTKPSSSVTPRHPLEGTHELRQACQICFVKSGPKLMDFTYHANIDHKCKKDILIGRIKNVEDKSWKKIRPRPTKTNYEGPYYICKDVAAEEECRYSGHCTFAYCQEEIDVWTLERKGAFSREAFFGGNGKINLTVFKLLQEHLGEFIFLCEKCFDHKPRMISKRNKDNSTACSHPVTKHEFEDNKCLVHILRETTVKYSKIRSFHGQCQLDLCRHEVRYGCLREDECFYAHSLVELKVWIMQNETGISHDAIAQESKRYWQNLEANVPGAQVLGNQIMPGFLNMKIKFVCAQCLRNGQVIEPDKNRKYCSAKARHSWTKDRRAMRVMSIERKKWMNIRPLPTKKQMPLQFDLCNHIASGKKCQYVGNCSFAHSPEEREVWTYMKENGIQDMEQFYELWLKS

SEQ ID NO: 7 - protein, 179 aa, Homo sapiens [sequence omitted]

SEQ ID NO: 8 - protein, 526 aa, Homo sapiens
MSHAYFIHHRVWFRVCWLERHFFRRKRKSDRVGGSLSKLEDRQAAAATTAAAAEPSSDVEVETHRSPGLHLSYLSGHQEWQDKENPELGGTRMPDRDSYANGTGSSGGGPGGGGSEEASGAGVGSGGASSDAICRDFLRNVCKRGKRCRYRHPDMSEVSNLGVSKNEFIFCHDFQNKECSRPNCRFIHGSKEDEDGYKKTGELPPRLRQKVAAGLGLSPADLPNGKEEVPICRDFLKGDCQRGAKCKFRHLQRDFEFDARGGGGTGGGSTGSVLPGRRHDLYDIYDLPDRGFEDHEPGPKRRRGGCCPPDGPHFESYEYSLAPPRGVECRLLEEENAMLRKRVEELKKQVSNLLATNEVLLEQNAQFRNQAKVITLSSTAPATEQTLAPTVGTVATFNHGIAQTHTTLSSQALQPRPVSQQELVAPAGAPAAPPTNAAPPAAPPPPPPHLTPEITPLSAALAQTIAQGMAPPPVSMAPVAVSVAPVAPVAVSMAQPLAGITMSHTTTPMVTYPIASQSMRITAMPH

SEQ ID NO: 9 - protein, 673 aa, Homo sapiens
ASATMAIVQTLPVPLEPAPEAATAPQAPVMGSVSSLISGRPCPGGPAPPRHHGPPGPTFFRQQDGLLRGGYEAQEPLCPAVPPRKAVPVTSFTYINEDFRTESPPSPSSDVEDAREQRAHNAHLRGPPPKLIPVSGKLEKNMEKILIRPTAFKPVLPKPRGAPSLPSFMGPRATGLSGSQGSLTQLFGGPASSSSSSSSSSAADKPLAFSGWASGCPSGTLSDSGRNSLSSLPTYSTGGAEPTTSSPGGHLPSHGSGRGALPGPARGVPTGPSHSDSGRSSSSKSTGSLGGRVAGGLLGSGTRASPDSSSCGERSPPPPPPPPSDEALLHCVLEGKLRDREAELQQLRDSLDENEATMCQAYEERQRHWQREREALREDCAAQAQRAQRAQQLLQLQVFQLQQEKRQLQDDFAQLLQEREQLERRCATLEREQRELGPRLEETKWEVCQKSGEISLLKQQLKESQAELVQKGSELVALRVALREARATLRVSEGRARGLQEAARARELELEACSQELQRHRQEAEQLREKAGQLDAEAAGLREPPVPPATADPFLLAESDEAKVQRAAAGVGGSLRAQVERLRVELQRERRRGEEQRDSFEGERLAWQAEKEQVIRYQKQLQHNYIQMYRRNRQLEQELQQLSLELEARELADLGLAEQAPCICLEEITATEI

SEQ ID NO: 10 - protein, 1226 aa, Homo sapiens
MWGSDRLAGAGGGGAAVTVAFTNARDCFLHLPRRLVAQLHLLQNQAIEVVWSHQPAFLSWVEGRHFSDQGENVAEINRQVGQKLGLSNGGQVFLKPCSHVVSCQQVEVEPLSADDWEILELHAVSLEQHLLDQIRIVFPKAIFPVWVDQQTYIFIQIVALIPAASYGRLETDTKLLIQPKTRRAKENTFSKADAEYKKLHSYGRDQKGMMKELQTKQLQSNTVGITESNENESEIPVDSSSVASLWTMIGSIFSFQSEKKQETSWGLTEINAFKNMQSKVVPLDNIFRVCKSQPPSIYNASATSVFHKHCAIHVFPWDQEYFDVEPSFTVTYGKLVKLLSPKQQQSKTKQNVLSPEKEKQMSEPLDQKKIRSDHNEEDEKACVLQVVWNGLEELNNAIKYTKNVEVLHLGKVWIPDDLRKRLNIEMHAVVRITPVEVTPKIPRSLKLQPRENLPKDISEEDIKTVFYSWLQQSTTTMLPLVISEEEFIKLETKDGLKEFSLSIVHSWEKEKDKNIFLLSPNLLQKTTIQVLLDPMVKEENSEEIDFILPFLKLSSLGGVNSLGVSSLEHITHSLLGRPLSRQLMSLVAGLRNGALLLTGGKGSGKSTLAKAICKEAFDKLDAHVERVDCKALRALNDMIKEFISMGSLVALIATSQSQQSLHPLLVSAQGVHIFQCVQHIQPPNQEQRCEILCNVIKNKLDCDINKFTDLDLQHVAKETGGFVARDFTVLVDRAIHSRLSRQSISTREKLVLTTLDFQKALRGFLPASLRSVNLHKPRDLGWDKIGGLHEVRQILMDTIQLPAKYPELFANLPIRQRTGILLYGPPGTGKTLLAGVIARESRMNFISVKGPELLSKYIGASEQAVRDIFIRAQAAKPCILFFDEFESIAPRRGHDNTGVTDRVVNQLLTQLDGVEGLQGVYVLAATSRPDLIDPALLRPGRLDKCVYCPPPDQVSRLEILNVLSDSLPLADDVDLQHVASVTDSFTGADLKALLYNAQLEALHGMLLSSGLQDGSSSSDSDLSLSSMVFLNHSSGSDDSAGDGECGLDQSLVSLEMSEILPDESKFNMYRLYFGSSYESELGNGTSSDLSSQCLSAPSSMTQDLPGVPGKDQLFSQPPVLRTASQEGCQELTQEQRDQLRADISIIKGRYRSQSGEDESMNQPGPIKTRLAISQSHLMTALGHTRPSISEDDWKNFAELYESFQNPKRRKNQSGTMFRPGQKVTLA

SEQ ID NO: 11 - protein, 330 aa, Homo sapiens [sequence omitted]

SEQ ID NO: 12 - protein, 933 aa, Homo sapiens
MDDSEVESTASILASVKEQEAQFEKLTRALEEERRHVSAQLERVRVSPQDANPLMANGTLTRRHQNGRFVGDADLERQKFSDLKLNGPQDHSHLLYSTIPRMQEPGQIVETYTEEDPEGAMSVVSVETSDDGTTRRTETTVKKVVKTVTTRTVQPVAMGPDGLPVDASSVSNNYIQTLGRDFRKNGNGGPGPYVGQAGTATLPRNFHYPPDGYSRHYEDGYPGGSDNYGSLSRVTRIEERYRPSMEGYRAPSRQDVYGPQPQVRVGGSSVDLHRFHPEPYGLEDDQRSMGYDDLDYGMMSDYGTARRTGTPSDPRRRLRSYEDMIGEEVPSDQYYWAPLAQHERGSLASLDSLRKGGPPPPNWRQPELPEVIAMLGFRLDAVKSNAAAYLQHLCYRNDKVKTDVRKLKGIPVLVGLLDHPKKEVHLGACGALKNISFGRDQDNKIAIKNCDGVPALVRLLRKARDMDLTEVITGTLWNLSSHDSIKMEIVDHALHALTDEVIIPHSGWEREPNEDCKPRHIEWESVLTNTAGCLRNVSSERSEARRKLRECDGLVDALIFIVQAEIGQKDSDSKLVENCVCLLRNLSYQVHREIPQAERYQEAAPNVANNTGPHAASCFGAKKGKGKKPIEDPANDTVDFPKRTSPARGYELLFQPEVVRIYISLLKESKTPAILEASAGAIQNLCAGRWTYGRYIRSALRQEKALSAIADLLTNEHERVVKAASGALRNLAVDARNKELIGKHAIPNLVKNLPGGQQNSSWNFSEDTVISILNTINEVIAENLEAAKKLRETQGIEKLVLINKSGNRSEKEVRAAALVLQTIWGYKELRKPLEKEGWKKSDFQVNLNNASRSQSSHSYDDSTLPLIDRNQKSDKKPDREEIQMSNMGSNTKSLDNNYSTPNERGDHNRTLDRSGDLGDMEPLKGTTPLMQKI

SEQ ID NO: 13 - protein, 653 aa, Homo sapiens
MKLLWQVTVHHHTWNAILLPFVYLTAQVWILCAAIAAAASAGPQNCPSVCSCSNQFSKVVCTRRGLSEVPQGIPSNTRYLNLMENNIQMIQADTFRHLHHLEVLQLGRNSIRQIEVGAFNGLASLNTLELFDNWLTVIPSGAFEYLSKLRELWLRNNPIESIPSYAFNRVPSLMRLDLGELKKLEYISEGAFEGLFNLKYLNLGMCNIKDMPNLTPLVGLEELEMSGNHFPEIRPGSFHGLSSLKKLWVMNSQVSLIERNAFDGLASLVELNLAHNNLSSLPHDLFTPLRYLVELHLHHNPWNCDCDILWLAWWLREYIPTNSTCCGRCHAPMHMRGRYLVEVDQASFQCSAPFIMDAPRDLNISEGRMAELKCRTPPMSSVKWLLPNGTVLSHASRHPRISVLNDGTLNFSHVLLSDTGVYTCMVTNVAGNSNASAYLNVSTAELNTSNYSFFTTVTVETTEISPEDTTRKYKPVPTTSTGYQPAYTTSTTVLIQTTRVPKQVAVPATDTTDKMQTSLDEVMKTTKIIIGCFVAVTLLAAAMLIVFYKLRKRHQQRSTVTAARTVEIIQVDEDIPAATSAAATAAPSGVSGEGAVVLPTIHDHINYNTYKPAHGAHWTENSLGNSLHPTVTTISEPYIIQTHTKDKVQETQI

SEQ ID NO: 14 - protein, 1749 aa, Homo sapiens
MSDTKVKVAVRVRPMNRRELELNTKCVVEMEGNQTVLHPPPSNTKQGERKPPKVFAFDYCFWSMDESNTTKYAGQEVVFKCLGEGILEKAFQGYNACIFAYGQTGSGKSFSMMGHAEQLGLIPRLCCALFKRISLEQNESQTFKVEVSYMEIYNEKVRDLLDPKGSRQSLKVREHKVLGPYVDGLSQLAVTSFEDIESLMSEGNKSRTVAATNMNEESSRSHAVFNIIITQTLYDLQSGNSGEKVSKVSLVDLAGSERVSKTGAAGERLKEGSNINKSLTTLGLVISSLADQAAGKGKSKFVPYRDSVLTWLLKDNLGGNSQTSMIATISPAADNYEETLSTLRYADRAKRIVNHAVVNEDPNAKVIRELREEVEKLREQLSQAEAMKAPELKEKLEESEKLIKELTVTWEEKLRKTEEIAQERQRQLESMGISLEMSGIKVGDDKCYLVNLNADPALNELLVYYLKDHTRVGADTSQDIQLFGIGIQPQHCEIDIASDGDVTLTPKENARSCVNGTLVCSTTQLWHGDRILWGNNHFFRINLPKRKRRDWLKDFEKETGPPEHDLDAASEASSEPDYNYEFAQMEVIMKTLNSNDPVQNVVQVLEKQYLEEKRSALEEQRLMYERELEQLRQQLSPDRQPQSSGPDRLAYSSQTAQQKVTQWAEERDELFRQSLAKLREQLVKANTLVREANFLAEEMSKLTDYQVTLQIPAANLSANRKRGAIVSEPAIQVRRKGKSTQVWTIEKLENKLIDMRDLYQEWKEKVPEAKRLYGKRGDPFYEAQENHNLIGVANVFLECLFCDVKLQYAVPIISQQGEVAGRLHVEVMRVTGAVPERVVEDDSSENSSESGSLEVVDSSGEIIHRVKKLTCRVKIKEATGLPLNLSNFVFCQYTFWDQCESTVAAPVVDPEVPSPQSKDAQYTVTFSHCKDYVVNVTEEFLEFISDGALAIEVWGHRCAGNGSSIWEVDSLHAKTRTLHDRWNEVTRRIEMWISILELNELGEYAAVELHQAKDVNTGGIFQLRQGHSRRVQVTVKPVQHSGTLPLMVEAILSVSIGCVTARSTKLQRGLDSYQEEDLNCVRERWSDALIKRREYLDEQIKKVSNKTEKTEDDVEREAQLVEQWVGLTEERNAVLVPAPGSGIPGAPADWIPPPGMETHIPVLFLDLNADDLSANEQLVGPHASGVNSILPKEHGSQFFYLPIIKHSDDEVSATASWDSSVHDSVHLNRVTPQNERIYLIVKTTVQLSHPAAMELVLRKRIAANIYNKQSFTQSLKRRISLKNIFYSCGVTYEIVSNIPKATEEIEDRETLALLAARSENEGTSDGETYIEKYTRGVLQVENILSLERLRQAVTVKEALSTKARHIRRSLSTPNVHNVSSSRPDLSGFDEDDKGWPENQLDMSDYSSSYQDVACYGTLPRDSPRRNKEGCTSETPHALTVSPFKAFSPQPPKFFKPLMPVKEEHKKRIALEARPLLSQEDSEEEENELEAINRKLISSQPYVPVEFADFSVYNASLENREWFSSKVDLSNSRVLEKEVSRSPTTSSITSGYFSHSASNATLSDMVVPSSDSSDQLAIQTKDADSTEHSTPSLVHDFRPSSNKELTEVEKGLVKDKIIVVPLKENSALAKGSPSSQSIPEKNSKSLCRTGSCSELDACPSKISQPARGFCPREVTVEHTTNILEDHSFTEFMGVSEGKDFDGLTDSSAGELSSRRSLPNKTGGKTVSDGLHHPSQLHSKLENDQGGTTSR

SEQ ID NO: 15 - protein, 259 aa, Homo sapiens [sequence omitted]

SEQ ID NO: 16 - protein, 221 aa, Homo sapiens [sequence omitted]

SEQ ID NO: 17 - protein, 394 aa, Homo sapiens
MGKEIPTDAPWEAQHADKWDKMTMKELIDKICWTKTARRFAYLFVNINVTSEPHEVSALWFLWYVKQCGGTTRIFSVTNGGQERKFVGGSGQVSERIMDLLGDQVKLNHPVTHVDQSSDNIIIETLNHEHYECKYVINAIPPTLTAKIHFRPELPAERNQLIQRLPMGAVIKCMMYYKEAFWKKKDYCGCMIIEDEDAPISITLDDTKPDGSLPAIMGFILARKADRLAKLHKEIRKKKICELYAKVLGSQEALHPVHYEEKNWCEEQYSGGCYTAYFPPGIMTQYGRVIRQPVGRIFFAGTETATKWSGYMEGAVEAGERAAREVLNGLGKVTEKDIWVQEPESKDVPAVEITHTFWERNLPSVSGLLKIIGFSTSVTALGFVLYKYKLLPRS

SEQ ID NO: 18 - protein, 973 aa, Homo sapiens [sequence omitted]

SEQ ID NO: 19 - protein, 844 aa, Homo sapiens [sequence omitted]

SEQ ID NO: 20 - protein, 124 aa, Homo sapiens
MAARLLRGSLRVLGGHRAPRQLPAARCSHSGGEERLETPSAKKLTDIGIRRIFSPEHDIFRKSVRKFFQEEVIPHHSEWEKAGEVSREVWEKAGKQGLLGVNIAEHLGGIGGDLYSAAIVWEEQ

SEQ ID NO: 21 - protein, 502 aa, Homo sapiens
MQSEIAMDRMKKIKRQLSMTLRGGRGIDKTNGAPEQIGLDESGGGGGSDPGEAPTRAAPGELRSARGPLSSAPEIVHEDLKMGSDGESDQASATSSDEVQSPVRVRMRNHPPRKISTEDINKRLSLPADIRLPEGYLEKLTLNSPIFDKPLSRRLRRVSLSEIGFGKLETYIKLDKLGEGTYATVYKGKSKLTDNLVALKEIRLEHEEGAPCTAIREVSLLKDLKHANIVTLHDIIHTEKSLTLVFEYLDKDLKQYLDDCGNIINMHNVKLFLFQLLRGLAYCHRQKVLHRDLKPQNLLINERGELKLADFGLARAKSIPTKTYSNEVVTLWYRPPDILLGSTDYSTQIDMWGVGCIFYEMATGRPLFPGSTVEEQLHFIFRILGTPTEETWPGILSNEEFKTYNYPKYRAEALLSHAPRLDSDGADLLTKLLQFEGRNRISAEDAMKHPFFLSLGERIHKLPDTTSIFALKEIQLQKEASLRSSSMPDSGRPAFRVVDTEF

SEQ ID NO: 22 - protein, 701 aa, Homo sapiens
MAVSAGSARTSPSSGFLMVLDIPQERGLSSLDRKYLDGLDVCRFPLLDALRPLPLDWMYLVYTIMFLGALGMMLGLCYRISCVLFLLPYWYVFLLDKTSWNNHSYLYGLLAFQLTFMDANHYWSVDGLLNAHRRNAHVPLWNYAVLRGQIFIVYFIAGVKKLDADWVEGYSMEYLSRHWLFSPFKLLLSEELTSLLVVHWGGLLLDLSAGFLLFFDVSRSIGLFFVSYFHCMNSQLFSIGMFSYVMLASSPLFCSPEWPRKLVSYCPRRLQQLLPLKAAPQPSVSCVYKRSRGKSGQKPGLRHQLGAAFTLLYLLEQLFLPYSHFLTQGYNNWTNGLYGYSWDMMVHSRSHQHVKITYRDGRTGELGYLNPGVFTQSRRWKDHADMLKQYATCLSRLLPKYNVTEPQIYFDIWVSINDRFQQRIFDPRVDIVQAAWSPFQRTSWVQPLLMDLSPWRAKLQEIKSSLDNHTEVVFIADFPGLHLENFVSEDLGNTSIQLLQGEVTVELVAEQKNQTLREGEKMQLPAGEYHKVYTTSPSPSCYMYVYVNTTELALEQDLAYLQELKEKVENGSETGPLPPELQPLLEGEVKGGPEPTPLVQTFLRRQQRLQEIERRRNTPFHERFFRFLLRKLYVFRRSFLMTCISLRNLILGRPSLEQLAQEVTYANLRPFEAVGELNPSNTDSSHSNPPESNPDPVHSEF

SEQ ID NO: 23 - protein, 699 aa, Homo sapiens
MGPAPAGEQLRGATGEPEVMEPALEGTGKEGKKASSRKRTLAEPPAKGLLQPVKLSRAELYKEPTNEELNRLRETEILFHSSLLRLQVEELLKEVRLSEKKKDRIDAFLREVNQRVVRVPSVPETELTDQAWLPAGVRVPLHQVPYAVKGCFRFLPPAQVTVVGSYLLGTCIRPDINVDVALTMPREILQDKDGLNQRYFRKRALYLAHLAHHLAQDPLFGSVCFSYTNGCHLKPSLLLRPRGKDERLVTVRLHPCPPPDFFRPCRLLPTKNNVRSAWYRGQSPAGDGSPEPPTPRYNTWVLQDTVLESHLQLLSTILSSAQGLKDGVALLKVWLRQRELDKGQGGFTGFLVSMLVVFLVSTRKIHTTMSGYQVLRSVLQFLATTDLTVNGISLCLSSDPSLPALADFHQAFSVVFLDSSGHLNLCADVTASTYHQVQHEARLSMMLLDSRADDGFHLLLMTPKPMIRAFDHVLHLRPLSRLQAACHRLKLWPELQDNGGDYVSAALGPLTTLLEQGLGARLNLLAHSRPPVPEWDISQDPPKHKDSGTLTLGLLLRPEGLTSVLELGPEADQPEAAKFRQFWGSRSELRRFQDGAIREAVVWEAASMSQKRLIPHQVVTHLLALHADIPETCVHYVGGPLDALIQGLKEASSTKGRMVMSRGGELVMVPNVEAILEDFAVLGEGLVQTVEARSERWTV

SEQ ID NO: 24 - protein, 526 aa, Homo sapiens [sequence omitted]

SEQ ID NO: 25 - protein, 1006 aa, Homo sapiens
MAAAYLDPNLNHTPNSSTKTHLGTGMERSPGAMERVLKVFHYFESNSEPTTWASIIRHGDATDVRGIIQKIVDSHKVKHVACYGFRLSHLRSEEVHWLHVDMGVSSVREKYELAHPPEEWKYELRIRYLPKGFLNQFTEDKPTLNFFYQQVKSDYMLEIADQVDQEIALKLGCLEIRRSYWEMRGNALEKKSNYEVLEKDVGLKRFFPKSLLDSVKAKTLRKLIQQTFRQFANLNREESILKFFEILSPVYRFDKECFKCALGSSWIISVELAIGPEEGISYLTDKGCNPTHLADFTQVQTIQYSNSEDKDRKGMLQLKIAGAPEPLTVTAPSLTIAENMADLIDGYCRLVNGTSQSFIIRPQKEGERALPSIPKLANSEKQGMRTHAVSVSETDDYAEIIDEEDTYTMPSTRDYEIQRERIELGRCIGEGQFGDVHQGIYMSPENPALAVAIKTCKNCTSDSVREKFLQEALTMRQFDHPHIVKLIGVITENPVWIIMELCTLGELRSFLQVRKYSLDLASLILYAYQLSTALAYLESKRFVHRDIAARNVLVSSNDCVKLGDFGLSRYMEDSTYYKASKGKLPIKWMAPESINFRRFTSASDVWMFGVCMWEILMHGVKPFQGVKNNDVIGRIENGERLPMPPNCPPTLYSLMTKCWAYDPSRRPRFTELKAQLSTILEEEKAQQEERMRMESRRQATVSWDSGGSDEAPPKPSRPGYPSPRSSEGFYPSPQHMVQTNHYQDSTVLDLRGIGQVLPTHLMEERLIRQQQEMEEDQRWLEKEERFLKPDVRLSRGSIDREDGSLQGPIGNQHIYQPVGKPDPAAPPKKPPRPGAPGHLGSLASLSSPADSYNEGVKLQPQEISPPPTANLDRSNDKVYENVTGLVKAVIEMSSKIQPAPPEEYVPMVKEVGLALRTLLATVDETIPLLPASTHREIEMAQKLLNSDLGELINKMKLAQQYVMTSLQQEYKKQMLTAAHALAVDAKNLLDVIDQARLKMLGQTRPH

SEQ ID NO: 26 - protein, 921 aa, Homo sapiens
MRWGHHLPRASWGSGFRRALQRPDDRIPFLIHWSWPLQGERPFGPPRAFIRHHGSSVDSAPPPGRHGRLFPSASATEAIQRHRRNLAEWFSRLPREERQFGPTFALDTVHVDPVIRESTPDELLRPPAELALEHQPPQAGLPPLALSQLFNPDACGRRVQTVVLYGTVGTGKSTLVRKMVLDWCYGRLPAFELLIPFSCEDLSSLGPAPASLCQLVAQRYTPLKEVLPLMAAAGSHLLFVLHGLEHLNLDFRLAGTGLCSDPEEPQEPAAIIVNLLRKYMLPQASILVTTRPSAIGRIPSKYVGRYGEICGFSDTNLQKLYFQLRLNQPYCGYAVGGSGVSATPAQRDHLVQMLSRNLEGHHQIAAACFLPSYCWLVCATLHFLHAPTPAGQTLTSIYTSFLRLNFSGETLDSTDPSNLSLMAYAARTMGKLAYEGVSSRKTYFSEEDVCGCLEAGIRTEEEFQLLHIFRRDALRFFLAPCVEPGRAGTFVFTVPAMQEYLAALYIVLGLRKTTLQKVGKEVAELVGRVGEDVSLVLGIMAKLLPLRALPLLFNLIKVVPRVFGRMVGKSREAVAQAMVLEMFREEDYYNDDVLDQMGASILGVEGPRRHPDEPPEDEVFELFPMFMGGLLSAHNRAVLAQLGCPIKNLDALENAQAIKKKLGKLGRQVLPPSELLDHLFFHYEFQNQRFSAEVLSSLRQLNLAGVRMTPVKCTVVAAVLGSGRHALDEVNLASCQLDPAGLRTLLPVFLRARKLGLQLNSLGPEACKDLRDLLLHDQCQITTLRLSNNPLTAAGVAVLMEGLAGNTSVTHLSLLHTGLGDEGLELLAAQLDRNRQLQELNVAYNGAGDTAALALARAAREHPSLELLQGVAIQMCWKLPLLPYAHLWTPRMPSHWCFLLILMPPLPQWYDGLVAPRGRCT

SEQ ID NO: 27 - protein, 665 aa, Homo sapiens
MGESSEDIDQMFSTLLGEMDLLTQSLGVDTLPPPDPNPPRAEFNYSVGFKDLNESLNALEDQDLDALMADLVADISEAEQRTIQAQKESLQNQHHSASLQASIFSGAASLGYGTNVAATGISQYEDDLPPPPADPVLDLPLPPPPPEPLSQEEEEAQAKADKIKLALEKLKEAKVKKLVVKVHMNDNSTKSLMVDERQLARDVLDNLFEKTHCDCNVDWCLYEIYPELQIERFFEDHENVVEVLSDWTRDTENKILFLEKEEKYAVFKNPQNFYLDNRGKKESKETNEKMNAKNKESLLEESFCGTSIIVPELEGALYLKEDGKKSWKRRYFLLRASGIYYVPKGKTKTSRDLACFIQFENVNIYYGTQHKMKYKAPTDYCFVLKHPQIQKESQYIKYLCCDDTRTLNQWVMGIRIAKYGKTLYDNYQRAVAKAGLASRWTNLGTVNAAAPAQPSTGPKTGTTQPNGQIPQATHSVSAVLQEAQRHAETSKDKKPALGNHHDPAVPRAPHAPKSSLPPPPPVRRSSDTSGSPATPLKAKGTGGGGLPAPPDDFLPPPPPPPPLDDPELPPPPPDFMEPPPDFVPPPPPSYAGIAGSELPPPPPPPAPAPAPVPDSARPPPAVAKRPPVPPKRQENPGHPGGAGGGEQDFMSDLMKALQKKRGNVS

SEQ ID NO: 28 - protein, 495 aa, Homo sapiens
MDICESILERKRHDSERSTCSILEQTDMEAVEALVCMSSWGQRSQKGDLLRIRPLTPVSDSGDVTTTVHMDAATPELPKDFHSLSTLCITPPQSPDLVEPSTRTPVSPQVTDSKACTATDVLQSSAVVARALSGGAERGLLGLEPVPSSPCRAKGTSVIRHTGESPAACFPTIQTPDCRLSDSREGEEQLLGHFETLQDTHLTDSLLSTNLVSCQPCLHKSGGLLLTDKGQQAGWPGAVQTCSPKNYENDLPRKTTPLISVSVPAPPVLCQMIPVTGQSSMLPAFLKPPPQLSVGTVRPILAQAAPAPQPVFVGPAVPQGAVMLVLPQGALPPPAPCAANVMAAGNTKLLPLAPAPVFITSSQNCVPQVDFSRRRNYVCSFPGCRKTYFKSSHLKAHLRTHTGEKPFNCSWDGCDKKFARSDELSRHRRTHTGEKKFVCPVCDRRFMRSDHLTKHARRHMTTKKIPGWQAEVGKLNRIASAESPGSPLVSMPASA

SEQ ID NO: 29 - protein, 376 aa, Homo sapiens
MWYHRLSHLHSRLQDLLKGGVIYPALPQPNFKSLLPLAVHWHHTASKSLTCAWQQHEDHFELKYANTVMRFDYVWLRDHCRSASCYNSKTHQRSLDTASVDLCIKPKTIRLDETTLFFTWPDGHVTKYDLNWLVKNSYEGQKQKVIQPRILWNAEIYQQAQVPSVDCQSFLETNEGLKKFLQNFLLYGIAFVENVPPTQEHTEKLAERISLIRETIYGRMWYFTSDFSRGDTAYTKLALDRHTDTTYFQEPCGIQVFHCLKHEGTGGRTLLVDGFYAAEQVLQKAPEEFELLSKVPLKHEYIEDVGECHNHMIGIGPVLNIYPWNKELYLIRLFKEKQNTVNRQWNSSLQCDIPERILTYRHFVSGTSIEHRGSLI

SEQ ID NO: 30 - protein, 503 aa, Homo sapiens
MDLIPNFAMETWVLVATSLVLLYIYGTHSHGLFKKLGIPGPTPLPFLGNILSYHKGFCMFDMECHKKYGKVWGFYDGQQPVLAITDPDMIKTVLVKECYSVFTNRRPFGPVGFMKSAISIAEDEEWKRLRSLLSPTFTSGKLKEMVPIIAQYGDVLVRNLRREAETGKPVTLKDVFGAYSMDVITSTSFGVNIDSLNNPQDPFVENTKKLLRFDFLDPFFLSITVFPFLIPILEVLNICVFPREVTNFLRKSVKRMKESRLEDTQKHRVDFLQLMIDSQNSKETESHKALSDLELVAQSIIFIFAGYETTSSVLSFIMYELATHPDVQQKLQEEIDAVLPNKAPPTYDTVLQMEYLDMVVNETLRLFPIAMRLERVCKKDVEINGMFIPKGVVVMIPSYALHRDPKYWTEPEKFLPERFSKKNKDNIDPYIYTPFGSGPRNCIGMRFALMNMKLALIRVLQNFSFKPCKETQIPLKLSLGGLLQPEKPVVLKVESRDGTVSGA

SEQ ID NO: 31 - protein, 315 aa, Homo sapiens
MQRRSRGINTGLILLLSQIFHVGINNIPPVTLATLALNIWFFLNPQKPLYSSCLSVEKCYQQKDWQRLLLSPLHHADDWHLYFNMASMLWKGINLERRLGSRWFAYVITAFSVLTGVVYLLLQFAVAEFMDEPDFKRSCAVGFSGVLFALKVLNNHYCPGGFVNILGFPVPNRFACWVELVAIHLFSPGTSFAGHLAGILVGLMYTQGPLKKIMEACAGGFSSSVGYPGRQYYFNSSGSSGYQDYYPHGRPDHYEEAPRNYDTYTAGLSEEEQLERALQASLWDRGNTRNSPPPYGFHLSPEEMRRQRLHRFDSQ

SEQ ID NO: 32 - protein, 376 aa, Homo sapiens
MDGEEQQPPHEANVEPVVPSEASEPVPRVLSGDPQNLSDVDAFNLLLEMKLKRRRQRPNLPRTVTQLVAEDGSRVYVVGTAHFSDDSKRDVVKTIREVQPDVVVVELCQYRVSMLKMDESTLLREAQELSLEKLQQAVRQNGLMSGLMQMLLLKVSAHITEQLGMAPGGEFREAFKEASKVPFCKFHLGDRPIPVTFKRAIAALSFWQKVRLAWGLCFLSDPISKDDVERCKQKDLLEQMMAEMIGEFPDLHRTIVSERDVYLTYMLRQAARRLELPRASDAEPRKCVPSVVVGVVGMGHVPGIEKNWSTDLNIQEIMTVPPPSVSGRVSRLAVKAAFFGLLGYSLYWMGRRTASLVLSLPAAQYCLQRVTEARHK

SEQ ID NO: 33 - protein, 296 aa, Homo sapiens
MGKKSRVKTQKSGTGATATVSPKEILNLTSELLQKCSSPAPGPGKEWEEYVQIRTLVEKIRKKQKGLSVTFDGKREDYFPDLMKWASENGASVEGFEMVNFKEEGFGLRATRDIKAEELFLWVPRKLLMTVESAKNSVLGPLYSQDRILQAMGNIALAFHLLCERASPNSFWQPYIQTLPSEYDTPLYFEEDEVRYLQSTQAIHDVFSQYKNTARQYAYFYKVIQTHPHANKLPLKDSFTYEDYRWAVSSVMTRQNQIPTEDGSRVTLALIPLWDMCNHTNGLTPEDSFALAVASA

SEQ ID NO: 34 - protein, 508 aa, Homo sapiens
MDHLGASLWPQVGSLCLLLAGAAWAPPPNLPDPKFESKAALLAARGPEELLCFTERLEDLVCFWEEAASAGVGPGNYSFSYQLEDEPWKLCRLHQAPTARGAVRFWCSLPTADTSSFVPLELRVTAASGAPRYHRVIHINEVVLLDAPVGLVARLADESGHVVLRWLPPPETPMTSHIRYEVDVSAGNGAGSVQRVEILEGRTECVLSNLRGRTRYTFAVRARMAEPSFGGFWSAWSEPVSLLTPSDLDPLILTLSLILVVILVLLTVLALLSHRRALKQKIWPGIPSPESEFEGLFTTHKGNFQLWLYQNDGCLWWSPCTPFTEDPPASLEVLSERCWGTMQAVEPGTDDEGPLLEPVGSEHAQDTYLVLDKWLLPRNPPSEDLPGPGGSVDIVAMDEGSEASSCSSALASKPSPEGASAASFEYTILDPSSQLLRPWTLCPELPPTPPHLKYLYLVVSDSGISTDYSSGDSQGAQGGLSDGPYSNPYENSLIPAAEPLPPSYVACS

SEQ ID NO: 35 - protein, 351 aa, Homo sapiens
METNFSTPLNEYEEVSYESAGYTVLRILPLVVLGVTFVLGVLGNGLVIWVAGFRMTRTVTTICYLNLALADFSFTATLPFLIVSMAMGEKWPFGWFLCKLIHIVVDINLFGSVFLIGFIALDRCICVLHPVWAQNHRTVSLAMKVIVGPWILALVLTLPVFLFLTTVTIPNGDTYCTFNFASWGGTPEERLKVAITMLTARGIIRFVIGFSLPMSIVAICYGLIAAKIHKKGMIKSSRPLRVLTAVVASFFICWFPFQLVALLGTVWLKEMLFYGKYKIIDILVNPTSSLAFFNSCLNPMLYVFVGQDFRERLIHSLPTSLERALSEDSAPTNDTAANSASPPAETELQAM

SEQ ID NO: 36 - protein, 508 aa, Homo sapiens
MNCQQLWLGFLLPMTVSGRVLGLAEVAPVDYLSQYGYLQKPLEGSNNFKPEDITEALRAFQEASELPVSGQLDDATRARMRQPRCGLEDPFNQKTLKYLLLGRWRKKHLTFRILNLPSTLPPHTARAALRQAFQDWSNVAPLTFQEVQAGAADIRLSFHGRQSSYCSNTFDGPGRVLAHADIPELGSVHFDEDEFWTEGTYRGVNLRIIAAHEVGHALGLGHSRYSQALMAPVYEGYRPHFKLHPDDVAGIQALYGKKSPVIRDEEEEETELPTVPPVPTEPSPMPDPCSSELDAMMLGPRGKTYAFKGDYVWTVSDSGPGPLFRVSALWEGLPGNLDAAVYSPRTQWIHFFKGDKVWRYINFKMSPGFPKKLNRVEPNLDAALYWPLNQKVFLFKGSGYWQWDELARTDFSSYPKPIKGLFTGVPNQPSAAMSWQDGRVYFFKGKVYWRLNQQLRVEKGYPRNISHNWMHCRPRTIDTTPSGGNTTPSGTGITLDTTLSATETTFEY

SEQ ID NO: 37 - protein, 474 aa, Homo sapiens
MVQQTNNAENTEALLAGESSDSGAGLELGIASSPTPGSTASTGGKADDPSWCKTPSGHIKRPMNAFMVWSQIERRKIMEQSPDMHNAEISKRLGKRWKLLKDSDKIPFIREAERLRLKHMADYPDYKYRPRKKVKSGNANSSSSAAASSKPGEKGDKVGGSGGGGHGGGGGGGSSNAGGGGGGASGGGANSKPAQKKSCGSKVAGGAGGGVSKPHAKLILAGGGGGGKAAAAAAASFAAEQAGAAALLPLGAAADHHSLYKARTPSASASASSAASASAALAAPGKHLAEKKVKRVYLFGGLGTSSSPVGGVGAGADPSDPLGLYEEEGAGCSPDAPSLSGRSSAASSPAAGRSPADHRGYASLRAASPAPSSAPSHASSSASSHSSSSSSSGSSSSDDEFEDDLLDLNPSSNFESMSLGSFSSSSALDRDLDFNFEPGSGSHFEFPDYCTPEVSEMISGDWLESSISNLVFTY

SEQ ID NO: 38 - protein, 148 aa, Homo sapiens
MFRRPVLQVLRQFVRHESETTTSLVLERSLNRVHLLGRVGQDPVLRQVEGKNPVTIFSLATNEMWRSGDSEVYQLGDVSQKTTWHRISVFRPGLRDVAYQYVKKGSRIYLEGKIDYGEYMDKNNVRRQATTIIADNIIFLSDQTKEKE

SEQ ID NO: 39 - protein, 367 aa, Homo sapiens
EKTGLSIRGAQEEDPPDPQLMRLDNMLLAEGVSGPEKGGGSAAAAAAAAASGGSSDNSIEHSDYRAKLTQIRQIYHTELEKYEQACNEFTTHVMNLLREQSRTRPISPKEIERMVGIIHRKFSSIQMQLKQSTCEAVMILRSRFLDARRKRRNFSKQATEILNEYFYSHLSNPYPSEEAKEELAKKCSITVSQSLVKDPKERGSKGSDIQPTSVVSNWFGNKRIRYKKNIGKFQEEANLYAAKTAVTAAHAVAAAVQNNQTNSPTTPNSGSSGSFNLPNSGDMFMNMQSLNGDSYQGSQVGANVQSQVDTLRHVINQTGGYSDGLGGNSLYSPHNLNANGGWQDATTPSSVTSPTEGPGSVHSDTSN

SEQ ID NO: 40 - protein, 1342 aa, Homo sapiens
MRANDALQVLGLLFSLARGSEVGNSQAVCPGTLNGLSVTGDAENQYQTLYKLYERCEVVMGNLEIVLTGHNADLSFLQWIREVTGYVLVAMNEFSTLPLPNLRVVRGTQVYDGKFAIFVMLNYNTNSSHALRQLRLTQLTEILSGGVYIEKNDKLCHMDTIDWRDIVRDRDAEIVVKDNGRSCPPCHEVCKGRCWGPGSEDCQTLTKTICAPQCNGHCFGPNPNQCCHDECAGGCSGPQDTDCFACRHFNDSGACVPRCPQPLVYNKLTFQLEPNPHTKYQYGGVCVASCPHNFVVDQTSCVRACPPDKMEVDKNGLKMCEPCGGLCPKACEGTGSGSRFQTVDSSNIDGFVNCTKILGNLDFLITGLNGDPWHKIPALDPEKLNVFRTVREITGYLNIQSWPPHMHNFSVFSNLTTIGGRSLYNRGFSLLIMKNLNVTSLGFRSLKEISAGRIYISANRQLCYHHSLNWTKVLRGPTEERLDIKHNRPRRDCVAEGKVCDPLCSSGGCWGPGPGQCLSCRNYSRGGVCVTHCNFLNGEPREFAHEAECFSCHPECQPMEGTATCNGSGSDTCAQCAHFRDGPHCVSSCPHGVLGAKGPIYKYPDVQNECRPCHENCTQGCKGPELQDCLGQTLVLIGKTHLTMALTVIAGLVVIFMMLGGTFLYWRGRRIQNKRAMRRYLERGESIEPLDPSEKANKVLARIFKETELRKLKVLGSGVFGTVHKGVWIPEGESIKIPVCIKVIEDKSGRQSFQAVTDHMLAIGSLDHAHIVRLLGLCPGSSLQLVTQYLPLGSLLDHVRQHRGALGPQLLLNWGVQIAKGMYYLEEHGMVHRNLAARNVLLKSPSQVQVADFGVADLLPPDDKQLLYSEAKTPIKWMALESIHFGKYTHQSDVWSYGVTVWELMTFGAEPYAGLRLAEVPDLLEKGERLAQPQICTIDVYMVMVKCWMIDENIRPTFKELANEFTRMARDPPRYLVIKRESGPGIAPGPEPHGLTNKKLEEVELEPELDLDLDLEAEEDNLATTTLGSALSLPVGTLNRPRGSQSLLSPSSGYMPMNQGNLGESCQESAVSGSSERCPRPVSLHPMPRGCLASESSEGHVTGSEAELQEKVSMCRSRSRSRSPRPRGDSAYHSQRHSLLTPVTPLSPPGLEEEDVNGYVMPDTHLKGTPSSREGTLSSVGLSSVLGTEEEDEDEEYEYMNRRRRHSPPHPPRPSSLEELGYEYMDVGSDLSASLGSTQSCPLHPVPIMPTAGTTPDEDYEYMNRQRDGGGPGGDYAAMGACPASEQGYEEMRAFQGPGHQAPHVHYARLKTLRSLEATDSAFDNPDYWHSRLFPKANAQRT

SEQ ID NO: 41 - protein, 561 aa, Homo sapiens [sequence omitted]

SEQ ID NO: 42 - protein, 152 aa, Homo sapiens
RPSGRKSSKMQAFRIWDVNQKTFYLRNNQLVAGYLQGPNVNLEEKIDVVPIEPHALFLGIHGGKMCLSCVKSGDETRLQLEAVNITDLSENRKQDKRFAFIRSDSGPTTSFESAACPGWFLCTAMEADQPVSLTNMPDEGVMVTKFYFQEDE

SEQ ID NO: 43 - protein, 298 aa, Homo sapiens
MWGACKVKVHDSLATISITLRRYLRLGATMAKSKFEYVRDFEADDTCLAHCWVVVRLDGRNFHRFAEKHNFAKPNDSRALQLMTKCAQTVMEELEDIVIAYGQSDEYSFVFKRKTNWFKRRASKFMTHVASQFASSYVFYWRDYFEDQPLLYPPGFDGRVVVYPSNQTLKDYLSWRQADCHINNLYNTVFWALIQQSGLTPVQAQGRLQGTLAADKNEILFSEFNINYNNEPPMYRKGTVLIWQKVDEVMTKEIKLPTEMEGKKMAVTRTRTKPVPLHCDIIGDAFWKEHPEILDEDS

SEQ ID NO: 44 - protein, 545 aa, Homo sapiens
MLLLHRAVVLRLQQACRLKSIPSRICIQACSTNDSFQPQRPSLTFSGDNSSTQGWRVMGTLLGLGAVLAYQDHRCRAAQESTHIYTKEEVSSHTSPETGIWVTLGSEVFDVTEFVDLHPGGPSKLMLAAGGPLEPFWALYAVHNQSHVRELLAQYKIGELNPEDKVAPTVETSDPYADDPVRHPALKVNSQRPFNAEPPPELLTENYITPNPIFFTRNHLPVPNLDPDTYRLHVVGAPGGQSLSLSLDDLHNFPRYEITVTLQCAGNRRSEMTQVKEVKGLEWRTGAISTARWAGARLCDVLAQAGHQLCETEAHVCFEGLDSDPTGTAYGASIPLARAMDPEAEVLLAYEMNGQPLPRDHGFPVRVVVPGVVGARHVKWLGRVSVQPEESYSHWQRRDYKGFSPSVDWETVDFDSAPSIQELPVQSAITEPRDGETVESGEVTIKGYAWSGGGRAVIRVDVSLDGGLTWQVAKLDGEEQRPRKAWAWRLWQLKAPVPAGQKELNIVCKAVDDGYNVQPDTVAPIWNLRGVLSNAWHRVHVYVSP

SEQ ID NO: 45 - protein, 775 aa, Homo sapiens [sequence omitted]

SEQ ID NO: 46 - protein, 453 aa, Homo sapiens
MGRTREAGCVAAGVVIGAGACYCVYRLAWGRDENEKIWDEDEESTDTSEIGVETVKGAKTNAGAGSGAKLQGDSEVKPEVSLGLEDCPGVKEKAHSGSHSGGGLEAKAKALFNTLKEQASAKAGKGARVGTISGNRTLAPSLPCPGGRGGGCHPTRSGSRAGGRASGKSKGKARSKSTRAPATTWPVRRGKFNFPYKIDDILSAPDLQKVLNILERTNDPFIQEVALVTLGNNAAYSFNQNAIRELGGVPIIAKLIKTKDPIIREKTYNALNNLSVNAENQGKIKTYISQVCDDTMVCRLDSAVQMAGLRLLTNMTVTNHYQHLLSYSFPDFFALLFLGNHFTKIQIMKLIINFTENPAMTRELVSCKVPSELISLFNKEWDREILLNILTLFENINDNIKNEGLASSRKEFSRSSLFFLFKESGVCVKKIKALANHNDLVVKVKVLKVLTKL

SEQ ID NO: 47 - protein, 338 aa, Homo sapiens
MELRSGSVGSQAVARRMDGDSRDGGGGKDATGSEDYENLPTSASVSTHMTAGAMAGILEHSVMYPVDSVKTRMQSLSPDPKAQYTSIYGALKKIMRTEGFWRPLRGVNVMIMGAGPAHAMYFACYENMKRTLNDVFHHQGNSHLANGIAGSMATLLHDAVMNPAEVVKQRLQMYNSQHRSAISCIRTVWRTEGLGAFYRSYTTQLTMNIPFQSIHFITYEFLQEQVNPHRTYNPQSHIISGGLAGALAAAATTPLDVCKTLLNTQENVALSLANISGRLSGMANAFRTVYQLNGLAGYFKGIQARVIYQMPSTAISWSVYEFFKYFLTKRQLENRAPY

SEQ ID NO: 48 - protein, 395 aa, Homo sapiens
MDFNMKKLASDAGIFFTRAVQFTEEKFGQAEKTELDAHFENLLARADSTKNWTEKILRQTEVLLQPNPSARVEEFLYEKLDRKVPSRVTNGELLAQYMADAASELGPTTPYGKTLIKVAEAEKQLGAAERDFIHTASISFLTPLRNFLEGDWKTISKERRLLQNRRLDLDACKARLKKAKAAEAKATTVPDFQETRPRNYILSASASALWNDEVDKAEQELRVAQTEFDRQAEVTRLLLEGISSTHVNHLRCLHEFVKSQTTYYAQCYRHMLDLQKQLGRFPGTFVGTTEPASPPLSSTSPTTAAATMPVVPSVASLAPPGEASLCLEEVAPPASGTRKARVLYDYEAADSSELALLADELITVYSLPGMDPDWLIGERGNKKGKVPVTYLELLS

SEQ ID NO: 49 - protein, 460 aa, Homo sapiens
MNFSEVFKLSSLLCKFSPDGKYLASCVQYRLVVRDVNTLQILQLYTCLDQIQHIEWSADSLFILCAMYKRGLVQVWSLEQPEWHCKIDEGSAGLVASCWSPDGRHILNTTEFHLRITVWSLCTKSVSYIKYPKACLQGITFTRDGRYMALAERRDCKDYVSIFVCSDWQLLRHFDTDTQDLTGIEWAPNGCVLAVWDTCLEYKILLYSLDGRLLSTYSAYEWSLGIKSVAWSPSSQFLAVGSYDGKVRILNHVTWKMITEFGHPAAINDPKIVVYKEAEKSPQLGLGCLSFPPPRAGAGPLPSSESKYEIASVPVSLQTLKPVTDRANPKIGIGMLAFSPDSYFLATRNDNIPNAVWVWDIQKLRLFAVLEQLSPVRAFQWDPQQPRLAICTGGSRLYLWSPAGCMSVQVPGEGDFAVLSLCWHLSGDSMALLSKDHFCLCFLETEAVVGTACRQLGGHT

SEQ ID NO: 50 - protein, 146 aa, Homo sapiens [sequence omitted]

SEQ ID NO: 51 - protein, 299 aa, Homo sapiens
MMLIPTHHFRNIERKPEYLQPEKCVPPPYPGPVGTMWFIRDGCGIACAIVTWFLVLYAEFVVLFVMLIPSRDYVYSIINGIVFNLLAFLALASHCRAMLTDPGAVPKGNATKEFIESLQLKPGQVVYKCPKCCSIKPDRAHHCSVCKRCIRKMDHHCPWVNNCVGENNQKYFVLFTMYIALISLHALIMVGFHFLHCFEEDWTKCSSFSPPTTVILLILLCFEGLLFLIFTSVMFGTQVHSICTDETGIEQLKKEERRWAKKTKWMNMKAVFGHPFSLGWASPFATPDQGKADPYQYVV

SEQ ID NO: 52 - protein, 250 aa, Homo sapiens
MSVIFFACVVRVRDGLPLSASTDFYHTQDFLEWRRRLKSLALRLAQYPGRGSAEGCDFSIHFSSFGDVACMAICSCQCPAAMAFCFLETLWWEFTASYDTTCIGLASRPYAFLEFDSIIQKVKWHFNYVSSSQMECSLEKIQEELKLQPPAVLTLEDTDVANGVMNGHTPMHLEPAPNFRMEPVTALGILSLILNIMCAALNLIRGVHLAEHSLQVAHEEIGNILAFLVPFVACIFQDPRSWFCWLDQTS

SEQ ID NO: 53 - protein, 453 aa, Homo sapiens
MRIPVDASTSRRFTPPSTALSPGKMSEALPLGAPDAGAALAGKLRSGDRSMVEVLADHPGELVRTDSPNFLCSVLPTHWRCNKTLPIAFKVVALGDVPDGTLVTVMAGNDENYSAELRNATAAMKNQVARFNDLRFVGRSGRGKSFTLTITVFTNPPQVATYHRAIKITVDGPREPRRHRQKLDDQTKPGSLSFSERLSELEQLRRTAMRVSPHHPAPTPNPRASLNHSTAFNPQPQSQMQDTRQIQPSPPWSYDQSYQYLGSIASPSVHPATPISPGRASGMTTLSAELSSRLSTAPDLTAFSDPRQFPALPSISDPRMHYPGAFTYSPTPVTSGIGIGMSAMGSATRYHTYLPPPYPGSSQAQGGPFQASSPSYHLYYGASAGSYQFSMVGGERSPPRILPPCTNASTGSALLNPSLPNQSDVVEAEGSHSNSPTNMAPSARLEEAVWRPY

SEQ ID NO: 54 - protein, 1283 aa, Homo sapiens
MWGSDRLAGAGGGGAAVTVAFTNARDCFLHLPRRLVAQLHLLQNQAIEVVWSHQPAFLSWVEGRHFSDQGENVAEINRQVGQKLGLSNGGQVFLKPCSHVVSCQQVEVEPLSADDWEILELHAVSLEQHLLDQIRIVFPKAIFPVWVDQQTYIFIQIVALIPAASYGRLETDTKLLIQPKTRRAKENTFSKADAEYKKLHSYGRDQKGMMKELQTKQLQSNTVGITESNENESEIPVDSSSVASLWTMIGSIFSFQSEKKQETSWGLTEINAFKNMQSKVVPLDNIFRVCKSQPPSIYNASATSVFHKHCAIHVFPWDQEYFDVEPSFTVTYGKLVKLLSPKQQQSKTKQNVLSPEKEKQMSEPLDQKKIRSDHNEEDEKACVLQVVWNGLEELNNAIKYTKNVEVLHLGKVWIPDDLRKRLNIEMHAVVRITPVEVTPKIPRSLKLQPRENLPKDISEEDIKTVFYSWLQQSTTTMLPLVISEEEFIKLETKDGLKEFSLSIVHSWEKEKDKNIFLLSPNLLQKTTIQVLLDPMVKEENSEEIDFILPFLKLSSLGGVNSLGVSSLEHITHSLLGRPLSRQLMSLVAGLRNGALLLTGGKGSGKSTLAKAICKEAFDKLDAHVERVDCKALRGKRLENIQKTLEVAFSEAVWMQPSVVLLDDLDLIAGLPAVPEHEHSPDAVQSQRLAHALNDMIKEFISMGSLVALIATSQSQQSLHPLLVSAQGVHIFQCVQHIQPPNQEQRCEILCNVIKNKLDCDINKFTDLDLQHVAKETGGFVARDFTVLVDRAIHSRLSRQSISTREKLVLTTLDFQKALRGFLPASLRSVNLHKPRDLGWDKIGGLHEVRQILMDTIQLPAKYPELFANLPIRQRTGILLYGPPGTGKTLLAGVIARESRMNFISVKGPELLSKYIGASEQAVRDIFIRAQAAKPCILFFDEFESIAPRRGHDNTGVTDRVVNQLLTQLDGVEGLQGVYVLAATSRPDLIDPALLRPGRLDKCVYCPPPDQVSRLEILNVLSDSLPLADDVDLQHVASVTDSFTGADLKALLYNAQLEALHGMLLSSGLQDGSSSSDSDLSLSSMVFLNHSSGSDDSAGDGECGLDQSLVSLEMSEILPDESKFNMYRLYFGSSYESELGNGTSSDLSSQCLSAPSSMTQDLPGVPGKDQLFSQPPVLRTASQEGCQELTQEQRDQLRADISIIKGRYRSQSGEDESMNQPGPIKTRLAISQSHLMTALGHTRPSISEDDWKNFAELYESFQNPKRRKNQSGTMFRPGQKVTLA

SEQ ID NO: 55 - protein, 148 aa, Homo sapiens; identical to SEQ ID NO: 38

SEQ ID NO: 56 - protein, 1476 aa, Homo sapiens
MTSSSPAGLEGSDLSSINTMMSAVMSVGKVTENGGSPQGIKSPSKPPGPNRIGRRNQETKEEKSSYNCPLCEKICTTQHQLTMHIRQHNTDTGGADHSCSICGKSLSSASSLDRHMLVHSGERPYKCTVCGQSFTTNGNMHRHMKIHEKDPNSATATAPPSPLKRRRLSSKRKLSHDAESEREDPAPAKKMVEDGQSGDLEKKADEVFHCPVCFKEFVCKYGLETHMETHSDNPLRCDICCVTFRTHRGLLRHNALVHKQLPRDAMGRPFIQNNPSIPAGFHDLGFTDFSCRKFPRISQAWCETNLRRCISEQHRFVCDTCDKAFPMLCSLALHKQTHVAADQGQEKPQATPLPGDALDQKGFLALLGLQHTKDVRPAPAEEPLPDDNQAIQLQTLKCQLPQDPGCTNLLSLSPFEAASLGGSLTVLPATKDSIKHLSLQPFQKGFIIQPDSSIVVKPISGESAIELADIQQILKMAASAPPQISLPPFSKAPAAPLQAIFKHMPPLKPKPLVTPRTVVATSTPPPLINAQQASPGCISPSLPPPPLKLLKGSVEAASNAHLLQSKSGTQPHAATRLSLQQPRAELPGQPEMKTQLEQDSIIEALLPLSMEAKIKQEITEGELKAFMTAPGGKKTPAMRKVLYPCRFCNQVFAFSGVLRAHVRSHLGISPYQCNICDYIAADKAALIRHLRTHSGERPYICKICHYPFTVKANCERHLRKKHLKATRKDIEKNIEYVSSSAAELVDAFCAPDTVCRLCGEDLKHYRALRIHMRTHCGRGLGGGHKGRKPFECKECSAAFAAKRNCIHHILKQHLHVPEQDIESYVLAADGLGPAEAPAAEASGRGEDSGCAALGDCKPLTAFLEPQNGFLHRGPTQPPPPHVSIKLEPASSFAVDFNEPLDFSQKGLALVQVKQENISFLSPSSLVPYDCSMEPIDLSIPKNFRKGDKDLATPSEAKKPEEEAGSSEQPSPCPAPGPSLPVTLGPSGILESPMAPAPAATPEPPAQPLQGPVQLAVPIYSSALVSSPPLVGSSALLSGTALLRPLRPKPPLLLPKPPVTEELPPLASIAQIISSVSSAPTLLKTKVADPGPASTGSNTTASDSLGGSVPKAATTATPAATTSPKESSEPPAPASSPEAASPTEQGPAGTSKKRGRKRGMRSRPRANSGGVDLDSSGEFASIEKMLATTDTNKFSPFLQTAEDNTQDEVAGAPADHHGPSDEEQGSPPEDKLLRAKRNSYTNCLQKITCPHCPRVFPWASSLQRHMLTHTGQKPFPCQKCDAFFSTKSNCERHQLRKHGVTTCSLRRNGLIPQSKESDVGSHDSTGERPYKCQTCERTFTLKHSLVRHQRIHQKARHAKHHGKDSDKEERGEEDSENESTHSGNNAVSENEAELAPNASNHMAVTRSRKEGLASATKDCSHREEKVTAGWPSEPGQGDLNPESPAALGQDLLEPRSKRPAHPILATADGASQLVGME

SEQ ID NO: 57 - protein, 1749 aa, Homo sapiens; identical to SEQ ID NO: 14

SEQ ID NO: 58 - protein, 303 aa, Homo sapiens
MGSAGRLHYLAMTAENPTPGDLAPAPLITCKLCLCEQSLDKMTTLQECQCIFCTACLKQYMQLAIREGCGSPITCPDMVCLNHGTLQEAEIACLVPVDQFQLYQRLKFEREVHLDPYRTWCPVADCQTVCPVASSDPGQPVLVECPSCHLKFCSCCKDAWHAEVSCRDSQPIVLPTEHRALFGTDAEAPIKQCPVCRVYIERNEGCAQMMCKNCKHTFCWYCLQNLDNDIFLRHYDKGPCRNKLGHSRASVMWNRTQVVGILVGLGIIALVTSPLLLLASPCIICCVCKSCRGKKKKHDPSTT

SEQ ID NO: 59 - protein, 724 aa, Homo sapiens
MPEEVHHGEEEVETFAFQAEIAQLMSLIINTFYSNKEIFLRELISNASDALDKIRYESLTDPSKLDSGKELKIDIIPNPQERTLTLVDTGIGMTKADLINNLGTIAKSGTKAFMEALQAGADISMIGQFGVGFYSAYLVAEKVVVITKHNDDEQYAWESSAGGSFTVRADHGEPIGRGTKVILHLKEDQTEYLEERRVKEVVKKHSQFIGYPITLYLEKEREKEISDDEAEEEKGEKEEEDKDDEEKPKIEDVGSDEEDDSGKDKKKKTKKIKEKYIDQEELNKTKPIWTRNPDDITQEEYGEFYKSLTNDWEDHLAVKHFSVEGQLEFRALLFIPRRAPFDLFENKKKKNNIKLYVRRVFIMDSCDELIPEYLNFIRGVVDSEDLPLNISREMLQQSKILKVIRKNIVKKCLELFSELAEDKENYKKFYEAFSKNLKLGIHEDSTNRRRLSELLRYHTSQSGDEMTSLSEYVSRMKETQKSIYYITGESKEQVANSAFVERVRKRGFEVVYMTEPIDEYCVQQLKEFDGKSLVSVTKEGLELPEDEEEKKKMEESKAKFENLCKLMKEILDKKVEKVTISNRLVSSPCCIVTSTYGWTANMERIMKAQALRDNSTMGYMMAKKHLEINPDHPIVETLRQKAEADKNDKAVKDLVVLLFETALLSSGFSLEDPQTHSNRIYRMIKLGLGIDEDEVAAEEPNAAVPDEIPPLEGDEDASRMEEVD

SEQ ID NO: 60 - protein, 214 aa, Homo sapiens
MSNYSVSLVGPAPWGFRLQGGKDFNMPLTISSLKDGGKAAQANVRIGDVVLSIDGINAQGMTHLEAQNKIKGCTGSLNMTLQRASAAPKPEPVPVQKKTQVTNNPGTVKIPPKRPPRKHIVERYTEFYHVPTHSDASKKRLIEDTEDWRPRTGTTQSRSFRILAQITGTEHLKESEADNTKKAKEKIPLHVFSPKYTKLRDWHHEVSARALNVQ

SEQ ID NO: 61 - protein, 497 aa, Homo sapiens
MKFLLTTAFLILISLWVEEAYSKEKSSKKGKGKKKQYLCPSQQSAEDLARVPANSTSNILNRLLVSYDPRIRPNFKGIPVDVVVNIFINSFGSIQETTMDYRVNIFLRQKWNDPRLKLPSDFRGSDALTVDPTMYKCLWKPDLFFANEKSANFHDVTQENILLFIFRDGDVLVSMRLSITLSCPLDLTLFPMDTQRCKMQLESFGYTTDDLRFIWQSGDPVQLEKIALPQFDIKKEDIEYGNCTKYYKGTGYYTCVEVIFTLRRQVGFYMMGVYAPTLLIVVLSWLSFWINPDASAARVPLGIFSVLSLASECTTLAAELPKVSYVKALDVWLIACLLFGFASLVEYAVVQVMLNNPKRVEAEKARIAKAEQADGKGGNVAKKNTVNGTGTPVHISTLQVGETRCKKVCTSKSDLRSNDFSIVGSLPRDFELSNYDCYGKPIEVNNGLGKSQAKNNKKPPPAKPVIPTAAKRIDLYARALFPFCFLFFNVIYWSIYL

SEQ ID NO: 62 - protein, 714 aa, Homo sapiens
MASEAPSPPRSPPPPTSPEPELAQLRRKVEKLERELRSCKRQVREIEKLLHHTERLYQNAESNNQELRTQVEELSKILQRGRNEDNKKSDVEVQTENHAPWSISDYFYQTYYNDVSLPNKVTELSDQQDQAIETSILNSKDHLQVENDAYPGTDRTENVKYRQVDHFASNSQEPASALATEDTSLEGSSLAESLRAAAEAAVSQTGFSYDENTGLYFDHSTGFYYDSENQLYYDPSTGIYYYCDVESGRYQFHSRVDLQPYPTSSTKQSKDKKLKKKRKDPDSSATNEEKDLNSEDQKAFSVEHTSCNEEENFANMKKKAKIGIHHKNSPPKVTVPTSGNTIESPLHENISNSTSFKDEKIMETDSEPEEGEITDSQTEDSYDEAITSEGNVTAEDSEDEDEDKIWPPCIRVIVIRSPVLQIGSLFIITAVNPATIGREKDMEHTLRIPEVGVSKFHAEIYFDHDLQSYVLVDQGSQNGTIVNGKQILQPKTKCDPYVLEHGDEVKIGETVLSFHIHPGSDTCDGCEPGQVRAHLRLDKKDESFVGPTLSKEEKELERRKELKKIRVKYGLQNTEYEDEKTLKNPKYKDRAGKRREQVGSEGTFQRDDAPASVHSEITDSNKGRKMLEKMGWKKGEGLGKDGGGMKTPIQLQLRRTHAGLGTGKPSSFEDVHLLQNKNKKNWDKARERFTENFPETKPQKDDPGTMPWVKGTLE

SEQ ID NO: 63 - protein, 339 aa, Homo sapiens
MNWELLLWLLVLCALLLLLVQLLRFLRADGDLTLLWAEWQGRRPEWELTDMVVWVTGASSGIGEELAYQLSKLGVSLVLSARRVHELERVKRRCLENGNLKEKDILVLPLDLTDTGSHEAATKAVLQEFGRIDILVNNGGMSQRSLCMDTSLDVYRKLIELNYLGTVSLTKCVLPHMIERKQGKIVTVNSILGIISVPLSIGYCASKHALRGFFNGLRTELATYPGIIVSNICPGPVQSNIVENSLAGEVTKTIGNNGDQSHKMTTSRCVRLMLISMANDLKEVWISEQPFLLVTYLWQYMPTWAWWITNKMGKKRIENFKSGVDADSSYFKIFKTKHD

SEQ ID NO: 64 - protein, 640 aa, Homo sapiens
MSERKEGRGKGKGKKKERGSGKKPESAAGSQSPALPPRLKEMKSQESAAGSKLVLRCETSSEYSSLRFKWFKNGNELNRKNKPQNIKIQKKPGKSELRINKASLADSGEYMCKVISKLGNDSASANITIVESNEIITGMPASTEGAYVSSESPIRISVSTEGANTSSSTSTSTTGTSHLVKCAEKEKTFCVNGGECFMVKDLSNPSRYLCKCQPGFTGARCTENVPMKVQNQEKAEELYQKRVLTITGICIALLVVGIMCVVAYCKTKKQRKKLHDRLRQSLRSERNNMMNIANGPHHPNPPPENVQLVNQYVSKNVISSEHIVEREAETSFSTSHYTSTAHHSTTVTQTPSHSWSNGHTESILSESHSVIVMSSVENSRHSSPTGGPRGRLNGTGGPRECNSFLRHARETPDSYRDSPHSERYVSAMTTPARMSPVDFHTPSSPKSPPSEMSPPVSSMTVSMPSMAVSPFMEEERPLLLVTPPRLREKKFDHHPQQFSSFHHNPAHDSNSLPASPLRIVEDEEYETTQEYEPAQEPVKKLANSRRAKRTKPNGHIANRLEVDSNTSSQSSNSESETEDERVGEDTPFLGIQNPLAASLEATPAFRLADSRTNPAGRFSTQEEIQARLSSVIANQDPIAV

SEQ ID NO: 65 - protein, 1074 aa, Homo sapiens
MISADCNLCLPEYDRYLASSKIMAAAYLDPNLNHTPNSSTKTHLGTGMERSPGAMERVLKVFHYFESNSEPTTWASIIRHGDATDVRGIIQKIVDSHKVKHVACYGFRLSHLRSEEVHWLHVDMGVSSVREKYELAHPPEEWKYELRIRYLPKGFLNQFTEDKPTLNFFYQQVKSDYMLEIADQVDQEIALKLGCLEIRRSYWEMRGNALEKKSNYEVLEKDVGLKRFFPKSLLDSVKAKTLRKLIQQTFRQFANLNREESILKFFEILSPVYRFDKECFKCALGSSWIISVELAIGPEEGISYLTDKGCNPTHLADFTQVQTIQYSNSEDKDRKGMLQLKIAGAPEPLTVTAPSLTIAENMADLIDGYCRLVNGTSQSFIIRPQKEGERALPSIPKLANSEKQGMRTHAVSVSETDDYAEIIDEEDTYTMPSTRDYEIQRERIELGRCIGEGQFGDVHQGIYMSPENPALAVAIKTCKNCTSDSVREKFLQEALTMRQFDHPHIVKLIGVITENPVWIIMELCTLGELRSFLQVRKYSLDLASLILYAYQLSTALAYLESKRFVHRDIAARNVLVSSNDCVKLGDFGLSRYMEDSTYYKASKGKLPIKWMAPESINFRRFTSASDVWMFGVCMWEILMHGVKPFQGVKNNDVIGRIENGERLPMPPNCPPTLYSLMTKCWAYDPSRRPRFTELKAQLSTILEEEKAQQEERMRMESRRQATVSWDSGGSDEAPPKPSRPGYPSPRSSEGFYPSPQHMVQTNHYQVSGYPGSHGITAMAGSIYPGQASLLDQTDSWNHRPQEIAMWQPNVEDSTVLDLRGIGQVLPTHLMEERLIRQQQEMEEDQRWLEKEERFLKPDVRLSRGSIDREDGSLQGPIGNQHIYQPVGKPDPAAPPKKPPRPGAPGHLGSLASLSSPADSYNEGVKLQPQEISPPPTANLDRSNDKVYENVTGLVKAVIEMSSKIQPAPPEEYVPMVKEVGLALRTLLATVDETIPLLPASTHREIEMAQKLLNSDLGELINKMKLAQQYVMTSLQQEYKKQMLTAAHALAVDAKNLLDVIDQARLKMLGQTRPH

SEQ ID NO: 66 - protein, 61 aa, Homo sapiens
MDPNCSCAAGDSCTCAGSCKCKECKCTSCKKSCCSCCPVGCAKCAQGCICKGASDKCSCCA

SEQ ID NO: 67 - protein, 359 aa, Homo sapiens
MKPALFSVLCEIKEKTGLSIRGAQEEDPPDPQLMRLDNMLLAEGVSGPEKGGGSAAAAAAAAASGGSSDNSIEHSDYRAKLTQIRQIYHTELEKYEQACNEFTTHVMNLLREQSRTRPISPKEIERMVGIIHRKFSSIQMQLKQSTCEAVMILRSRFLDARRKRRNFSKQATEILNEYFYSHLSNPYPSEEAKEELAKKCSITVSQVSNWFGNKRIRYKKNIGKFQEEANLYAAKTAVTAAHAVAAAVQNNQTNSPTTPNSGSSGSFNLPNSGDMFMNMQSLNGDSYQGSQVGANVQSQVDTLRHVINQTGGYSDGLGGNSLYSPHNLNANGGWQDATTPSSVTSPTEGPGSVHSDTSN

SEQ ID NO: 68 - protein, 99 aa, Homo sapiens
MQPRVLLVVALLALLASARASEAEDASLLSFMQGYMKHATKTAKDALSSVQESQVAQQARGWVTDGFSSLKDYWSTVKDKFSEFWDLDPEVRPTSAVAA

SEQ ID NO: 69 - protein, 376 aa, Homo sapiens; identical to SEQ ID NO: 32

SEQ ID NO: 70 - protein, 299 aa, Homo sapiens; identical to SEQ ID NO: 51

SEQ ID NO: 71 - protein, 415 aa, Homo sapiens
MTGERPSTALPDRRWGPRILGFWGGCRVWVFAAIFLLLSLAASWSKAENDFGLVQPLVTMEQLLWVSGRQIGSVDTFRIPLITATPRGTLLAFAEARKMSSSDEGAKFIALRRSMDQGSTWSPTAFIVNDGDVPDGLNLGAVVSDVETGVVFLFYSLCAHKAGCQVASTMLVWSKDDGVSWSTPRNLSLDIGTEVFAPGPGSGIQKQREPRKGRLIVCGHGTLERDGVFCLLSDDHGASWRYGSGVSGIPYGQPKQENDFNPDECQPYELPDGSVVINARNQNNYHCHCRIVLRSYDACDTLRPRDVTFDPELVDPVVAAGAVVTSSGIVFFSNPAHPEFRVNLTLRWSFSNGTSWRKETVQLWPGPSGYSSLATLEGSMDGEEQAPQLYVLYEKGRNHYTESISVAKISVYGTL

SEQ ID NO: 72 - protein, 499 aa, Homo sapiens
MAMAEGERTECAEPPRDEPPADGALKRAEELKTQANDYFKAKDYENAIKFYSQAIELNPSNAIYYGNRSLAYLRTECYGYALGDATRAIELDKKYIKGYYRRAASNMALGKFRAALRDYETVVKVKPHDKDAKMKYQECNKIVKQKAFERAIAGDEHKRSVVDSLDIESMTIEDEYSGPKLEDGKVTISFMKELMQWYKDQKKLHRKCAYQILVQVKEVLSKLSTLVETTLKETEKITVCGDTHGQFYDLLNIFELNGLPSETNPYIFNGDFVDRGSFSVEVILTLFGFKLLYPDHFHLLRGNHETDNMNQIYGFEGEVKAKYTAQMYELFSEVFEWLPLAQCINGKVLIMHGGLFSEDGVTLDDIRKIERNRQPPDSGPMCDLLWSDPQPQNGRSISKRGVSCQFGPDVTKAFLEENNLDYIIRSHEVKAEGYEVAHGGRCVTVFSAPNYCDQMGNKASYIHLQGSDLRPQFHQFTAVPHPNVKPMAYANTLLQLGMM

SEQ ID NO: 73 - protein, 699 aa, Homo sapiens; identical to SEQ ID NO: 23

SEQ ID NO: 74 - protein, 3114 aa, Homo sapiens
MSWALEEWKEGLPTRALQKIQELEGQLDKLKKEKQQRQFQLDSLEAALQKQKQKVENEKTEGTNLKRENQRLMEICESLEKTKQKISHELQVKESQVNFQEGQLNSGKKQIEKLEQELKRCKSELERSQQAAQSADVSLNPCNTPQKIFTTPLTPSQYYSGSKYEDLKEKYNKEVEERKRLEAEVKALQAKKASQTLPQATMNHRDIARHQASSSVFSWQQEKTPSHLSSNSQRTPIRRDFSASYFSGEQEVTPSRSTLQIGKRDANSSFFDNSSSPHLLDQLKAQNQELRNKINELELRLQGHEKEMKGQVNKFQELQLQLEKAKVELIEKEKVLNKCRDELVRTTAQYDQASTKYTALEQKLKKLTEDLSCQRQNAESARCSLEQKIKEKEKEFQEELSRQQRSFQTLDQECIQMKARLTQELQQAKNMHNVLQAELDKLTSVKQQLENNLEEFKQKLCRAEQAFQASQIKENELRRSMEEMKKENNLLKSHSEQKAREVCHLEAELKNIKQCLNQSQNFAEEMKAKNTSQETMLRDLQEKINQQENSLTLEKLKLAVADLEKQRDCSQDLLKKREHHIEQLNDKLSKTEKESKALLSALELKKKEYEELKEEKTLFSCWKSENEKLLTQMESEKENLQSKINHLETCLKTQQIKSHEYNERVRTLEMDRENLSVEIRNLHNVLDSKSVEVETQKLAYMELQQKAEFSDQKHQKEIENMCLKTSQLTGQVEDLEHKLQLLSNEIMDKDRCYQDLHAEYESLRDLLKSKDASLVTNEDHQRSLLAFDQQPAMHHSFANIIGEQGSMPSERSECRLEADQSPKNSAILQNRVDSLEFSLESQKQMNSDLQKQCEELVQIKGEIEENLMKAEQMHQSFVAETSQRISKLQEDTSAHQNVVAETLSALENKEKELQLLNDKVETEQAEIQELKKSNHLLEDSLKELQLLSETLSLEKKEMSSIISLNKREIEELTQENGTLKEINASLNQEKMNLIQKSESFANYIDEREKSISELSDQYKQEKLILLQRCEETGNAYEDLSQKYKAAQEKNSKLECLLNECTSLCENRKNELEQLKEAFAKEHQEFLTKLAFAEERNQNLMLELETVQQALRSEMTDNQNNSKSEAGGLKQEIMTLKEEQNKMQKEVNDLLQENEQLMKVMKTKHECQNLESEPIRNSVKERESERNQCNFKPQMDLEVKEISLDSYNAQLVQLEAMLRNKELKLQESEKEKECLQHELQTIRGDLETSNLQDMQSQEISGLKDCEIDAEEKYISGPHELSTSQNDNAHLQCSLQTTMNKLNELEKICEILQAEKYELVTELNDSRSECITATRKMAEEVGKLLNEVKILNDDSGLLHGELVEDIPGGEFGEQPNEQHPVSLAPLDESNSYEHLTLSDKEVQMHFAELQEKFLSLQSEHKILHDQHCQMSSKMSELQTYVDSLKAENLVLSTNLRNFQGDLVKEMQLGLEEGLVPSLSSSCVPDSSSLSSLGDSSFYRALLEQTGDMSLLSNLEGAVSANQCSVDEVFCSSLQEENLTRKETPSAPAKGVEELESLCEVYRQSLEKLEEKMESQGIMKNKEIQELEQLLSSERQELDCLRKQYLSENEQWQQKLTSVTLEMESKLAAEKKQTEQLSLELEVARLQLQGLDLSSRSLLGIDTEDAIQGRNESCDISKEHTSETTERTPKHDVHQICDKDAQQDLNLDIEKITETGAVKPTGECSGEQSPDTNYEPPGEDKTQGSSECISELSFSGPNALVPMDFLGNQEDIHNLQLRVKETSNENLRLLHVIEDRDRKVESLLNEMKELDSKLHLQEVQLMTKIEACIELEKIVGELKKENSDLSEKLEYFSCDHQELLQRVETSEGLNSDLEMHADKSSREDIGDNVAKVNDSWKERFLDVENELSRIRSEKASIEHEALYLEADLEVVQTEKLCLEKDNENKQKVIVCLEEELSVVTSERNQLRGELDTMSKKTTALDQLSEKMKEKTQELESHQSECLHCIQVAEAEVKEKTELLQTLSSDVSELLKDKTHLQEKLQSLEKDSQALSLTKCELENQIAQLNKEKELLVKESESLQARLSESDYEKLNVSKALEAALVEKGEFALRLSSTQEEVHQLRRGIEKLRVRIEADEKKQLHIAEKLKERERENDSLKDKVENLERELQMSEENQELVILDAENSKAEVETLKTQIEEMARSLKVFELDLVTLRSEKENLTKQIQEKQGQLSELDKLLSSFKSLLEEKEQAEIQIKEESKTAVEMLQNQLKELNEAVAALCGDQEIMKATEQSLDPPIEEEHQLRNSIEKLRARLEADEKKQLCVLQQLKESEHHADLLKGRVENLERELEIARTNQEHAALEAENSKGEVETLKAKIEGMTQSLRGLELDVVTIRSEKENLTNELQKEQERISELEIINSSFENILQEKEQEKVQMKEKSSTAMEMLQTQLKELNERVAALHNDQEACKAKEQNLSSQVECLELEKAQLLQGLDEAKNNYIVLQSSVNGLIQEVEDGKQKLEKKDEEISRLKNQIQDQEQLVSKLSQVEGEHQLWKEQNLELRNLTVELEQKIQVLQSKNASLQDTLEVLQSSYKNLENELELTKMDKMSFVEKVNKMTAKETELQREMHEMAQKTAELQEELSGEKNRLAGELQLLLEEIKSSKDQLKELTLENSELKKSLDCMHKDQVEKEGKVREEIAEYQLRLHEAEKKHQALLLDTNKQYEVEIQTYREKLTSKEECLSSQKLEIDLLKSSKEELNNSLKATTQILEELKKTKMDNLKYVNQLKKENERAQGKMKLLIKSCKQLEEEKEILQKELSQLQAAQEKQKTGTVMDTKVDELTTEIKELKETLEEKTKEADEYLDKYCSLLISHEKLEKAKEMLETQVAHLCSQQSKQDSRGSPLLGPVVPGPSPIPSVTEKRLSSGQNKASGKRQRSSGIWENGRGPTPATPESFSKKSKKAVMSGIHPAEDTEGTEFEPEGLPEVVKKGFADIPTGKTSPYILRRTTMATRTSPRLAAQKLALSPLSLGKENLAESSKPTAGGSRSQKVKVAQRSPVDSGTILREPTTKSVPVNNLPERSPTDSPREGLRVKRGRLVPSPKAGLESNGSENCKVQ

SEQ ID NO: 75 - protein, 599 aa, Homo sapiens
MPSSLPGSQVPHPTLDAVDLVEKTLRNEGTSSSAPVLEEGDTDPWTLPQLKDTSQPWKELRVAGRLRRVAGSVLKACGLLGSLYFFICSLDVLSSAFQLLGSKVAGDIFKDNVVLSNPVAGLVIGVLVTALVQSSSTSSSIVVSMVAAKLLTVRVSVPIIMGVNVGTSITSTLVSMAQSGDRDEFQRAFSGSAVHGIFNWLTVLVLLPLESATALLERLSELALGAASLTPRAQAPDILKVLTKPLTHLIVQLDSDMIMSSATGNATNSSLIKHWCGTTGQPTQENSSCGAFGPCTEKNSTAPADRLPCRHLFAGTELTDLAVGCILLAGSLLVLCGCLVLIVKLLNSVLRGRVAQVVRTVINADFPFPLGWLGGYLAVLAGAGLTFALQSSSVFTAAVVPLMGVGVISLDRAYPLLLGSNIGTTTTALLAALASPADRMLSALQVALIHFFFNLAGILLWYLVPALRLPIPLARHFGVVTARYRWVAGVYLLLGFLLLPLAAFGLSLAGGMVLAAVGGPLVGLVLLVILVTVLQRRRPAWLPVRLRSWAWLPVWLHSLEPWDRLVTRCCPCNVCSPPKATTKEAYCYENPEILASQQL

SEQ ID NO: 76 - protein, 527 aa, Homo sapiens
MENQEKASIAGHMFDVVVIGGGISGLSAAKLLTEYGVSVLVLEARDRVGGRTYTIRNEHVDYVDVGGAYVGPTQNRILRLSKELGIETYKVNVSERLVQYVKGKTYPFRGAFPPVWNPIAYLDYNNLWRTIDNMGKEIPTDAPWEAQHADKWDKMTMKELIDKICWTKTARRFAYLFVNINVTSEPHEVSALWFLWYVKQCGGTTRIFSVTNGGQERKFVGGSGQVSERIMDLLGDQVKLNHPVTHVDQSSDNIIIETLNHEHYECKYVINAIPPTLTAKIHFRPELPAERNQLIQRLPMGAVIKCMMYYKEAFWKKKDYCGCMIIEDEDAPISITLDDTKPDGSLPAIMGFILARKADRLAKLHKEIRKKKICELYAKVLGSQEALHPVHYEEKNWCEEQYSGGCYTAYFPPGIMTQYGRVIRQPVGRIFFAGTETATKWSGYMEGAVEAGERAAREVLNGLGKVTEKDIWVQEPESKDVPAVEITHTFWERNLPSVSGLLKIIGFSTSVTALGFVLYKYKLLPRS

SEQ ID NO: 77 - protein, 483 aa, Homo sapiens
MTMPVNGAHKDADLWSSHDKMLAQPLKDSDVEVYNIIKKESNRQRVGLELIASENFASRAVLEALGSCLNNKYSEGYPGQRYYGGTEFIDELETLCQKRALQAYKLDPQCWGVNVQPYSGSPANFAVYTALVEPHGRIMGLDLPDGGHLTHGFMTDKKKISATSIFFESMPYKVNPDTGYINYDQLEENARLFHPKLIIAGTSCYSRNLEYARLRKIADENGAYLMADMAHISGLVAAGVVPSPFEHCHVVTTTTHKTLRGCRAGMIFYRKGVKSVDPKTGKEILYNLESLINSAVFPGLQGGPHNHAIAGVAVALKQAMTLEFKVYQHQVVANCRALSEALTELGYKIVTGGSDNHLILVDLRSKGTDGGRAEKVLEACSIACNKNTCPGDRSALRPSGLRLGTPALTSRGLLEKDFQKVAHFIHRGIELTLQIQSDTGVRATLKEFKERLAGDKYQAAVQALREEVESFASLFPLPGLPDF

SEQ ID NO: 78 - protein, 394 aa, Homo sapiens
MDSALSDPHNGSAEAGGPTNSTTRPPSTPEGIALAYGSLLLMALLPIFFGALRSVRCARGKNASDMPETITSRDAARFPIIASCTLLGLYLFFKIFSQEYINLLLSMYFFVLGILALSHTISPFMNKFFPASFPNRQYQLLFTQGSGENKEEIINYEFDTKDLVCLGLSSIVGVWYLLRKHWIANNLFGLAFSLNGVELLHLNNVSTGCILLGGLFIYDVFWVFGTNVMVTVAKSFEAPIKLVFPQDLLEKGLEANNFAMLGLGDVVIPGIFIALLLRFDISLKKNTHTYFYTSFAAYIFGLGLTIFIMHIFKHAQPALLYLVPACIGFPVLVALAKGEVTEMFSYESSAEILPHTPRLTHFPTVSGSPASLADSMQQKLAGPRRRRPQNPSAM

SEQ ID NO: 79 - protein, 748 aa, Homo sapiens
MDVSGQETDWRSTAFRQKLVSQIEDAMRKAGVAHSKSSKDMESHVFLKAKTRDEYLSLVARLIIHFRDIHNKKSQASVSDPMNALQSLTGGPAAGAAGIGMPPRGPGQSLGGMGSLGAMGQPMSLSGQPPPGTSGMAPHSMAVVSTATPQTQLQLQQVALQQQQQQQQFQQQQQAALQQQQQQQQQQQFQAQQSAMQQQFQAVVQQQQQLQQQQQQQQHLIKLHHQNQQQIQQQQQQLQRIAQLQLQQQQQQQQQQQQQQQQALQAQPPIQQPPMQQPQPPPSQALPQQLQQMHHTQHHQPPPQPQQPPVAQNQPSQLPPQSQTQPLVSQAQALPGQMLYTQPPLKFVRAPMVVQQPPVQPQVQQQQTAVQTAQAAQMVAPGVQVSQSSLPMLSSPSPGQQVQTPQSMPPPPQPSPQPGQPSSQPNSNVSSGPAPSPSSFLPSPSPQPSQSPVTARTPQNFSVPSPGPLNTPVNPSSVMSPAGSSQAEEQQYLDKLKQLSKYIEPLRRMINKIDKNEDRKKDLSKMKSLLDILTDPSKRCPLKTLQKCEIALEKLKNDMAVPTPPPPPVPPTKQQYLCQPLLDAVLANIRSPVFNHSLYRTFVPAMTAIHGPPITAPVVCTRKRRLEDDERQSIPSVLQGEVARLDPKFLVNLDPSHCSNNGTVHLICKLDDKDLPSVPPLELSVPADYPAQSPLWIDRQWQYDANPFLQSVHRCMTSRLLQLPDKHSVTALLNTWAQSVHQACLSAA

SEQ ID NO: 80 - protein, 342 aa, Homo sapiens
MRKETPPPLVPPAAREWNLPPNAPACMERQLEAARYRSDGALLLGASSLSGRCWAGSLWLFKDPCAAPNEGFCSAGVQTEAGVADLTWVGERGILVASDSGAVELWELDENETLIVSKFCKYEHDDIVSTVSVLSSGTQAVSGSKDICIKVWDLAQQVVLSSYRAHAAQVTCVAASPHKDSVFLSCSEDNRILLWDTRCPKPASQIGCSAPGYLPTSLAWHPQQSEVFVFGDENGTVSLVDTKSTSCVLSSAVHSQCVTGLVFSPHSVPFLASLSEDCSLAVLDSSLSELFRSQAHRDFVRDATWSPLNHSLLTTVGWDHQVVHHVVPTEPLPAPGPASVTE

SEQ ID NO: 81 - protein, 1555 aa, Homo sapiens
MGCKGDASGACAAGALPVTGVCYKMGVLVVLTVLWLFSSVKADSKAITTSLTTKWFSTPLLLEASEFLAEDSQEKFWNFVEASQNIGSSDHDGTDYSYYHAILEAAFQFLSPLQQNLFKFCLSLRSYSATIQAFQQIAADEPPPEGCNSFFSVHGKKTCESDTLEALLLTASERPKPLLFKGDHRYPSSNPESPVVIFYSEIGSEEFSNFHRQLISKSNAGKINYVFRHYIFNPRKEPVYLSGYGVELAIKSTEYKAKDDTQVKGTEVNTTVIGENDPIDEVQGFLFGKLRDLHPDLEGQLKELRKHLVESTNEMAPLKVWQLQDLSFQTAARILASPVELALVVMKDLSQNFPTKARAITKTAVSSELRTEVEENQKYFKGTLGLQPGDSALFINGLHMDLDTQDIFSLFDVLRNEARVMEGLHRLGIEGLSLHNVLKLNIQPSEADYAVDIRSPAISWVNNLEVDSRYNSWPSSLQELLRPTFPGVIRQIRKNLHNMVFIVDPAHETTAELMNTAEMFLSNHIPLRIGFIFVVNDSEDVDGMQDAGVAVLRAYNYVAQEVDDYHAFQTLTHIYNKVRTGEKVKVEHVVSVLEKKYPYVEVNSILGIDSAYDRNRKEARGYYEQTGVGPLPVVLFNGMPFEREQLDPDELETITMHKILETTTFFQRAVYLGELPHDQDVVEYIMNQPNVVPRINSRILTAERDYLDLTASNNFFVDDYARFTILDSQGKTAAVANSMNYLTKKGMSSKEIYDDSFIRPVTFWIVGDFDSPSGRQLLYDAIKHQKSSNNVRISMINNPAKEISYENTQISRAIWAALQTQTSNAAKNFITKMAKEGAAEALAAGADIAEFSVGGMDFSLFKEVFESSKMDFILSHAVYCRDVLKLKKGQRAVISNGRIIGPLEDSELFNQDDFHLLENIILKTSGQKIKSHIQQLRVEEDVASDLVMKVDALLSAQPKGDPRIEYQFFEDRHSAIKLRPKEGETYFDVVAVVDPVTREAQRLAPLLLVLAQLINMNLRVFMNCQSKLSDMPLKSFYRYVLEPEISFTSDNSFAKGPIAKFLDMPQSPLFTLNLNTPESWMVESVRTPYDLDNIYLEEVDSVVAAEYELEYLLLEGHCYDITTGQPPRGLQFTLGTSANPVIVDTIVMANLGYFQLKANPGAWILRLRKGRSEDIYRIYSHDGTDSPPDADEVVIVLNNFKSKIIKVKVQKKADMVNEDLLSDGTSENESGFWDSFKWGFTGQKTEEVKQDKDDIINIFSVASGHLYERFLRIMMLSVLKNTKTPVKFWFLKNYLSPTFKEFIPYMANEYNFQYELVQYKWPRWLHQQTEKQRIIWGYKILFLDVLFPLVVDKFLFVDADQIVRTDLKELRDFNLDGAPYGYTPFCDSRREMDGYRFWKSGYWASHLAGRKYHISALYVVDLKKFRKIAAGDRLRGQYQGLSQDPNSLSNLDQDLPNNMIHQVPIKSLPQEWLWCETWCDDASKKRAKTIDLCNNPMTKEPKLEAAVRIVPEWQDYDQEIKQLQIRFQKEKETGALYKEKTKEPSREGPQKREEL

SEQ ID NO: 82 - protein, 453 aa, Homo sapiens; identical to SEQ ID NO: 53

SEQ ID NO: 83 - protein, 1074 aa, Homo sapiens; identical to SEQ ID NO: 65

SEQ ID NO: 84 - protein, 666 aa, Homo sapiens
MGESSEDIDQMFSTLLGEMDLLTQSLGVDTLPPPDPNPPRAEFNYSVGFKDLNESLNALEDQDLDALMADLVADISEAEQRTIQAQKESLQNQHHSASLQASIFSGAASLGYGTNVAATGISQYEDDLPPPPADPVLDLPLPPPPPEPLSQEEEEAQAKADKIKLALEKLKEAKVKKLVVKVHMNDNSTKSLMVDERQLARDVLDNLFEKTHCDCNVDWCLYEIYPELQIERFFEDHENVVEVLSDWTRDTENKILFLEKEEKYAVFKNPQNFYLDNRGKKESKETNEKMNAKNKESLLEESFCGTSIIVPELEGALYLKEDGKKSWKRRYFLLRASGIYYVPKGKTKTSRDLACFIQFENVNIYYGTQHKMKYKAPTDYCFVLKHPQIQKESQYIKYLCCDDTRTLNQWVMGIRIAKYGKTLYDNYQRAVAKAGLASRWTNLGTVNAAAPAQPSTGPKTGTTQPNGQIPQATHSVSAVLQEAQRHAETSKDKKPALGNHHDPAVPRAPHAPKSSLPPPPPVRRSSDTSGSPATPLKAKGTGGGGLPAPPDDFLPPPPPPPPLDDPELPPPPPDFMEPPPDFVPPPPPSYAGIAGSELPPPPPPPPAPAPAPVPDSARPPPAVAKRPPVPPKRQENPGHPGGAGGGEQDFMSDLMKALQKKRGNVS

SEQ ID NO: 85 - protein, 1234 aa, Homo sapiens
MAGAQPGVHALQLEPPTVVETLRRGSKFIKWDEETSSRNLVTLRVDPNGFFLYWTGPNMEVDTLDISSIRDTRTGRYARLPKDPKIREVLGFGGPDARLEEKLMTVVSGPDPVNTVFLNFMAVQDDTAKVWSEELFKLAMNILAQNASRNTFLRKAYTKLKLQVNQDGRIPVKNILKMFSADKKRVETALESCGLKFNRSESIRPDEFSLEIFERFLNKLCLRPDIDKILLEIGAKGKPYLTLEQLMDFINQKQRDPRLNEVLYPPLRPSQARLLIEKYEPNQQFLERDQMSMEGFSRYLGGEENGILPLEALDLSTDMTQPLSAYFINSSHNTYLTAGQLAGTSSVEMYRQALLWGCRCVELDVWKGRPPEEEPFITHGFTMTTEVPLRDVLEAIAETAFKTSPYPVILSFENHVDSAKQQAKMAEYCRSIFGDALLIEPLDKYPLAPGVPLPSPQDLMGRILVKNKKRHRPSAGGPDSAGRKRPLEQSNSALSESSAATEPSSPQLGSPSSDSCPGLSNGEEVGLEKPSLEPQKSLGDEGLNRGPYVLGPADREDEEEDEEEEEQTDPKKPTTDEGTASSEVNATEEMSTLVNYIEPVKFKSFEAARKRNKCFEMSSFVETKAMEQLTKSPMEFVEYNKQQLSRIYPKGTRVDSSNYMPQLFWNVGCQLVALNFQTLDVAMQLNAGVFEYNGRSGYLLKPEFMRRPDKSFDPFTEVIVDGIVANALRVKVISGQFLSDRKVGIYVEVDMFGLPVDTRRKYRTRTSQGNSFNPVWDEEPFDFPKVVLPTLASLRIAAFEEGGKFVGHRILPVSAIRSGYHYVCLRNEANQPLCLPALLIYTEASDYIPDDHQDYAEALINPIKHVSLMDQRARQLAALIGESEAQAGQETCQDTQSQQLGSQPSSNPTPSPLDASPRRPPGPTTSPASTSLSSPGQRDDLIASILSEVAPTPLDELRGHKALVKLRSRQERDLRELRKKHQRKAVTLTRRLLDGLAQAQAEGRCRLRPGALGGAADVEDTKEGEDEAKRYQEFQNRQVQSLLELREAQVDAEAQRRLEHLRQALQRLREVVLDANTTQFKRLKEMNEREKKELQKILDRKRHNSISEAKMRDKHKKEAELTEINRRHITESVNSIRRLEEAQKQRHDRLVAGQQQVLQQLAEEEPKLLAQLAQECQEQRARLPQEIRRSLLGEMPEGLGDGPLVACASNGHAPGSSGHLSGADSESQEENTQL

SEQ ID NO: 86 - protein, 613 aa, Homo sapiens
MGALRPTLLPPSLPLLLLLMLGMGCWAREVLVPEGPLYRVAGTAVSISCNVTGYEGPAQQNFEWFLYRPEAPDTALGIVSTKDTQFSYAVFKSRVVAGEVQVQRLQGDAVVLKIARLQAQDAGIYECHTPSTDTRYLGSYSGKVELRVLPDVLQVSAAPPGPRGRQAPTSPPRMTVHEGQELALGCLARTSTQKHTHLAVSFGRSVPEAPVGRSTLQEVVGIRSDLAVEAGAPYAERLAAGELRLGKEGTDRYRMVVGGAQAGDAGTYHCTAAEWIQDPDGSWAQIAEKRAVLAHVDVQTLSSQLAVTVGPGERRIGPGEPLELLCNVSGALPPAGRHAAYSVGWEMAPAGAPGPGRLVAQLDTEGVGSLGPGYEGRHIAMEKVASRTYRLRLEAARPGDAGTYRCLAKAYVRGSGTRLREAASARSRPLPVHVREEGVVLEAVAWLAGGTVYRGETASLLCNISVRGGPPGLRLAASWWVERPEDGELSSVPAQLVGGVGQDGVAELGVRPGGGPVSVELVGPRSHRLRLHSLGPEDEGVYHCAPSAWVQHADYSWYQAGSARSGPVTVYPYMHALDTLFVPLLVGTGVALVTGATVLGTITCCFMKRLRKR

SEQ ID NO: 87 - protein, 130 aa, Homo sapiens
MSSSGGAPGASASSAPPAQEEGMTWWYRWLCRLSGVLGAVSCAISGLFNCITIHPLNIAAGVWMMMAVVPIVISLTLTTLLGNAIAFATGVLYGLSALGKKGDAISYARIQQQRQQADEEKLAETLEGEL

SEQ ID NO: 88 - protein, 392 aa, Homo sapiens
MDALVEDDICILNHEKAHKRDTVTPVSIYSGDESVASHFALVTAYEDIKKRLKDSEKENSLLKKRIRFLEEKLIARFEEETSSVGREQVNKAYHAYREVCIDRDNLKSKLDKMNKDNSESLKVLNEQLQSKEVELLQLRTEVETQQVMRNLNPPSSNWEVEKLSCDLKIHGLEQELELMRKECSDLKIELQKAKQTDPYQEDNLKSRDLQKLSISSDNMQHAYWELKREMSNLHLVTQVQAELLRKLKTSTAIKKACAPVGCSEDLGRDSTKLHLMNFTATYTRHPPLLPNGKALCHTTSSPLPGDVKVLSEKAILQSWTDNERSIPNDGTCFQEHSSYGRNSLEDNSWVFPSPPKSSETAFGETKTKTLPLPNLPPLHYLDQHNQNCLYKN

SEQ ID NO: 89 - protein, 221 aa, Homo sapiens
MASSTSLPAPGSRPKKPLGKMADWFRQTLLKKPKKRPNSPESTSSDASQPTSQDSPLPPSLSSVTSPSLPPTHASDSGSSRWSKDYDVCVCHSEEDLVAAQDLVSYLEGSTASLRCFLQLRDATPGGAIVSELCQALSSSHCRVLLITPGFLQDPWCKYQMLQALTEAPGAEGCTIPLLSGLSRAAYPPELRFMYYVDGRGPDGGFRQVKEAVMRYLQTLS

SEQ ID NO: 90 - protein, 116 aa, Homo sapiens
MSATAATAPPAAPAGEGGPPAPPPNLTSNRRLQQTQAQVDEVVDIMRVNVDKVLERDQKLSELDDRADALQAGASQFETSAAKLKRKYWWKNLKMMIILGVICAIILIIIIVYFST

SEQ ID NO: 91 - protein, 159 aa, Homo sapiens
MALETICRPSGRKSSKMQAFRIWDVNQKTFYLRNNQLVAGYLQGPNVNLEEKIDVVPIEPHALFLGIHGGKMCLSCVKSGDETRLQLEAVNITDLSENRKQDKRFAFIRSDSGPTTSFESAACPGWFLCTAMEADQPVSLTNMPDEGVMVTKFYFQEDE

SEQ ID NO: 92 - protein, 212 aa, Homo sapiens
MKATIILLLLAQVSWAGPFQQRGLFDFMLEDEASGIGPEVPDDRDFEPSLGPVCPFRCQCHLRVVQCSDLGLPPSLTELHLDGNKISRVDAASLKGLNNLAKLGLSFNSISAVDNGSLANTPHLRELHLDNNKLTRVPGGLAEHKYIQVVYLHNNNISVVGSSDFCPPGHNTKKASYSGVSLFSNPVQYWEIQPSTFRCVYVRSAIQLGNYK

SEQ ID NO: 93 - protein, 714 aa, Homo sapiens
MMQESATETISNSSMNQNGMSTLSSQLDAGSRDGRSSGDTSSEVSTVELLHLQQQQALQAARQLLLQQQTSGLKSPKSSDKQRPLQVPVSVAMMTPQVITPQQMQQILQQQVLSPQQLQALLQQQQAVMLQQQQLQEFYKKQQEQLHLQLLQQQQQQQQQQQQQQQQQQQQQQQQQQQQQQQQQQQQQQQQHPGKQAKEQQQQQQQQQLAAQQLVFQQQLLQMQQLQQQQHLLSLQRQGLISIPPGQAALPVQSLPQAGLSPAEIQQLWKEVTGVHSMEDNGIKHGGLDLTTNNSSSTTSSNTSKASPPITHHSIVNGQSSVLSARRDSSSHEETGASHTLYGHGVCKWPGCESICEDFGQFLKHLNNEHALDDRSTAQCRVQMQVVQQLEIQLSKERERLQAMMTHLHMRPSEPKPSPKPLNLVSSVTMSKNMLETSPQSLPQTPTTPTAPVTPITQGPSVITPASVPNVGAIRRRHSDKYNIPMSSEIAPNYEFYKNADVRPPFTYATLIRQAIMESSDRQLTLNEIYSWFTRTFAYFRRNAATWKNAVRHNLSLHKCFVRVENVKGAVWTVDEVEYQKRRSQKITGSPTLVKNIPTSLGYGAALNASLQAALAESSLPLLSNPGLINNASSGLLQAVHEDLNGSLDHIDSNGNSSPGCSPQPHIHSIHVKEEPVIAEDEDCPMSLVTTANHSPELEDDREIEEEPLSEDLE

SEQ ID NO: 94 - protein, 298 aa, Homo sapiens
MVRMVPVLLSLLLLLGPAVPQENQDGRYSLTYIYTGLSKHVEDVPAFQALGSLNDLQFFRYNSKDRKSQPMGLWRQVEGMEDWKQDSQLQKAREDIFMETLKDIVEYYNDSNGSHVLQGRFGCEIENNRSSGAFWKYYYDGKDYIEFNKEIPAWVPFDPAAQITKQKWEAEPVYVQRAKAYLEEECPATLRKYLKYSKNILDRQDPPSVVVTSHQAPGEKKKLKCLAYDFYPGKIDVHWTRAGEVQEPELRGDVLHNGNGTYQSWVVVAVPPQDTAPYSCHVQHSSLAQPLVVPWEAS

SEQ ID NO: 95 - protein, 214 aa, Homo sapiens
MRPKTGQVGCETPEELGPGPRQRWPLLLLGLAMVAHGLLRPMVAPQSGDPDPGASVGSSRSSLRSLWGRLLLQPSPQRADPRCWPRGFWSEPQSLCYVFGTGTKVTVLGQPKANPTVTLFPPSSEELQANKATLVCLISDFYPGAVTVAWKADGSPVKAGVETTKPSKQSNNKYAASSYLSLTPEQWKSHRSYSCQVTHEGSTVEKTVAPTECS

SEQ ID NO: 96 - protein, 520 aa, Homo sapiens
MVARVGLLLRALQLLLWGHLDAQPAERGGQELRKEAEAFLEKYGYLNEQVPKAPTSTRFSDAIRAFQWVSQLPVSGVLDRATLRQMTRPRCGVTDTNSYAAWAERISDLFARHRTKMRRKKRFAKQGNKWYKQHLSYRLVNWPEHLPEPAVRGAVRAAFQLWSNVSALEFWEAPATGPADIRLTFFQGDHNDGLGNAFDGPGGALAHAFLPRRGEAHFDQDERWSLSRRRGRNLFVVLAHEIGHTLGLTHSPAPRALMAPYYKRLGRDALLSWDDVLAVQSLYGKPLGGSVAVQLPGKLFTDFETWDSYSPQGRRPETQGPKYCHSSFDAITVDRQQQLYIFKGSHFWEVAADGNVSEPRPLQERWVGLPPNIEAAAVSLNDGDFYFFKGGRCWRFRGPKPVWGLPQLCRAGGLPRHPDAALFFPPLRRLILFKGARYYVLARGGLQVEPYYPRSLQDWGGIPEEVSGALPRPDGSIIFFRDDRYWRLDQAKLQATTSGRWATELPWMGCWHANSGSALF

SEQ ID NO: 97 - protein, 1156 aa, Homo sapiens
MSKLRMVLLEDSGSADFRRHFVNLSPFTITVVLLLSACFVTSSLGGTDKELRLVDGENKCSGRVEVKVQEEWGTVCNNGWSMEAVSVICNQLGCPTAIKAPGWANSSAGSGRIWMDHVSCRGNESALWDCKHDGWGKHSNCTHQQDAGVTCSDGSNLEMRLTRGGNMCSGRIEIKFQGRWGTVCDDNFNIDHASVICRQLECGSAVSFSGSSNFGEGSGPIWFDDLICNGNESALWNCKHQGWGKHNCDHAEDAGVICSKGADLSLRLVDGVTECSGRLEVRFQGEWGTICDDGWDSYDAAVACKQLGCPTAVTAIGRVNASKGFGHIWLDSVSCQGHEPAVWQCKHHEWGKHYCNHNEDAGVTCSDGSDLELRLRGGGSRCAGTVEVEIQRLLGKVCDRGWGLKEADVVCRQLGCGSALKTSYQVYSKIQATNTWLFLSSCNGNETSLWDCKNWQWGGLTCDHYEEAKITCSAHREPRLVGGDIPCSGRVEVKHGDTWGSICDSDFSLEAASVLCRELQCGTVVSILGGAHFGEGNGQIWAEEFQCEGHESHLSLCPVAPRPEGTCSHSRDVGVVCSRYTEIRLVNGKTPCEGRVELKTLGAWGSLCNSHWDIEDAHVLCQQLKCGVALSTPGGARFGKGNGQIWRHMFHCTGTEQHMGDCPVTALGASLCPSEQVASVICSGNQSQTLSSCNSSSLGPTRPTIPEESAVACIESGQLRLVNGGGRCAGRVEIYHEGSWGTICDDSWDLSDAHVVCRQLGCGEAINATGSAHFGEGTGPIWLDEMKCNGKESRIWQCHSHGWGQQNCRHKEDAGVICSEFMSLRLTSEASREACAGRLEVFYNGAWGTVGKSSMSETTVGVVCRQLGCADKGKINPASLDKAMSIPMWVDNVQCPKGPDTLWQCPSSPWEKRLASPSEETWITCDNKIRLQEGPTSCSGRVEIWHGGSWGTVCDDSWDLDDAQVVCQQLGCGPALKAFKEAEFGQGTGPIWLNEVKCKGNESSLWDCPARRWGHSECGHKEDAAVNCTDISVQKTPQKATTGRSSRQSSFIAVGILGVVLLAIFVALFFLTKKRRQRQRLAVSSRGENLVHQIQYREMNSCLNADDLDLMNSSENSHESADFSAAELISVSKFLPISGMEKEAILSHTEKENGNL

SEQ ID NO: 98 - protein, 2210 aa, Homo sapiens
MTAAANWVANGASLEDCHSNLFSLAELTGIKWRRYNFGGHGDCGPIISAPAQDDPILLSFIRCLQANLLCVWRRDVKPDCKELWIFWWGDEPNLVGVIHHELQVVEEGLWENGLSYECRTLLFKAIHNLLERCLMDKNFVRIGKWFVRPYEKDEKPVNKSEHLSCAFTFFLHGESNVCTSVEIAQHQPIYLINEEHIHMAQSSPAPFQVLVSPYGLNGTLTGQAYKMSDPATRKLIEEWQYFYPMVLKKKEESKEEDELGYDDDFPVAVEVIVGGVRMVYPSAFVLISQNDIPVPQSVASAGGHIAVGQQGLGSVKDPSNCGMPLTPPTSPEQAILGESGGMQSAASHLVSQDGGMITMHSPKRSGKIPPKLHNHMVHRVWKECILNRTQSKRSQMSTPTLEEEPASNPATWDFVDPTQRVSCSCSRHKLLKRCAVGPNRPPTVSQPGFSAGPSSSSSLPPPASSKHKTAERQEKGDKLQKRPLIPFHHRPSVAEELCMEQDTPGQKLGLAGIDSSLEVSSSRKYDKQMAVPSRNTSKQMNLNPMDSPHSPISPLPPTLSPQPRGQETESLDPPSVPVNPALYGNGLELQQLSTLDDRTVLVGQRLPLMAEVSETALYCGIRPSNPESSEKWWHSYRLPPSDDAEFRPPELQGERCDAKMEVNSESTALQRLLAQPNKRFKIWQDKQPQLQPLHFLDPLPLSQQPGDSLGEVNDPYTFEDGDIKYIFTANKKCKQGTEKDSLKKNKSEDGFGTKDVTTPGHSTPVPDGKNAMSIFSSATKTDVRQDNAAGRAGSSSLTQVTDLAPSLHDLDNIFDNSDDDELGAVSPALRSSKMPAVGTEDRPLGKDGRAAVPYPPTVADLQRMFPTPPSLEQHPAFSPVMNYKDGISSETVTALGMMESPMVSMVSTQLTEFKMEVEDGLGSPKPEEIKDFSYVHKVPSFQPFVGSSMFAPLKMLPSHCLLPLKIPDACLFRPSWAIPPKIEQLPMPPAATFIRDGYNNVPSVGSLADPDYLNTPQMNTPVTLNSAAPASNSGAGVLPSPATPRFSVPTPRTPRTPRTPRGGGTASGQGSVKYDSTDQGSPASTPSTTRPLNSVEPATMQPIPEAHSLYVTLILSDSVMNIFKDRNFDSCCICACNMNIKGADVGLYIPDSSNEDQYRCTCGFSAIMNRKLGYNSGLFLEDELDIFGKNSDIGQAAERRLMMCQSTFLPQVEGTKKPQEPPISLLLLLQNQHTQPFASLNFLDYISSNNRQTLPCVSWSYDRVQADNNDYWTECFNALEQGRQYVDNPTGGKVDEALVRSATVHSWPHSNVLDISMLSSQDVVRMLLSLQPFLQDAIQKKRTGRTWENIQHVQGPLTWQQFHKMAGRGTYGSEESPEPLPIPTLLVGYDKDFLTISPFSLPFWERLLLDPYGGHRDVAYIVVCPENEALLEGAKTFFRDLSAVYEMCRLGQHKPICKVLRDGIMRVGKTVAQKLTDELVSEWFNQPWSGEENDNHSRLKLYAQVCRHHLAPYLATLQLDSSLLIPPKYQTPPAAAQGQATPGNAGPLAPNGSAAPPAGSAFNPTSNSSSTNPAASSSASGSSVPPVSSSASAPGISQISTTSSSGFSGSVGGQNPSTGGISADRTQGNIGCGGDTDPGQSSSQPSQDGQESVTERERIGIPTEPDSADSHAHPPAVVIYMVDPFTYAAEEDSTSGNFWLLSLMRCYTEMLDNLPEHMRNSFILQIVPCQYMLQTMKDEQVFYIQYLKSMAFSVYCQCRRPLPTQIHIKSLTGFGPAASIEMTLKNPERPSPIQLYSPPFILAPIKDKQTELGETFGEASQKYNVLFVGYCLSHDQRWLLASCTDLHGELLETCVVNIALPNRSRRSKVSARKIGLQKLWEWCIGIVQMTSLPWRVVIGRLGRLGHGELKDWSILLGECSLQTISKKLKDVCRMCGISAADSPSILSACLVAMEPQGSFVVMPDAVTMGSVFGRSTALNMQSSQLNTPQDASCTHILVFPTSSTIQVAPANYPNEDGFSPNNDDMFVDLPFPDDMDNDIGILMTGNLHSSPNSSPVPSPGSPSGIGVGSHFQHSRSQGERLLSREAPEELKQQPLALGYFVSTAKAENLPQWFWSSCPQAQNQCPLFLKASLHHHISVAQTDELLPARNSQRVPHPLDSKTTSDVLRFVLEQYNALSWLTCNPATQDRTSCLPVHFVVLTQLYNAIMNIL

SEQ ID NO: 99 - protein, 570 aa, Homo sapiens
MGNWAVNEGLSIFVILVWLGLNVFLFVWYYRVYDIPPKFFYTRKLLGSALALARAPAACLNFNCMLILLPVCRNLLSFLRGSSACCSTRVRRQLDRNLTFHKMVAWMIALHSAIHTIAHLFNVEWCVNARVNNSDPYSVALSELGDRQNESYLNFARKRIKNPEGGLYLAVTLLAGITGVVITLCLILIITSSTKTIRRSYFEVFWYTHHLFVIFFIGLAIHGAERIVRGQTAESLAVHNITVCEQKISEWGKIKECPIPQFAGNPPMTWKWIVGPMFLYLCERLVRFWRSQQKVVITKVVTHPFKTIELQMKKKGFKMEVGQYIFVKCPKVSKLEWHPFTLTSAPEEDFFSIHIRIVGDWTEGLFNACGCDKQEFQDAWKLPKIAVDGPFGTASEDVFSYEVVMLVGAGIGVTPFASILKSVWYKYCNNATNLKLKKIYFYWLCRDTHAFEWFADLLQLLESQMQERNNAGFLSYNIYLTGWDESQANHFAVHHDEEKDVITGLKQKTLYGRPNWDNEFKTIASQHPNTRIGVFLCGPEALAETLSKQSISNSESGPRGVHFIFNKENF

SEQ ID NO: 100 - protein, 676 aa, Homo sapiens
MAPFLRIAFNSYELGSLQAEDEANQPFCAVKMKEALSTERGKTLVQKKPTMYPEWKSTFDAHIYEGRVIQIVLMRAAEEPVSEVTVGVSVLAERCKKNNGKAEFWLDLQPQAKVLMSVQYFLEDVDCKQSMRSEDEAKFPTMNRRGAIKQAKIHYIKNHEFIATFFGQPTFCSVCKDFVWGLNKQGYKCRQCNAAIHKKCIDKIIGRCTGTAANSRDTIFQKERFNIDMPHRFKVHNYMSPTFCDHCGSLLWGLVKQGLKCEDCGMNVHHKCREKVANLCGINQKLLAEALNQVTQRASRRSDSASSEPVGIYQGFEKKTGVAGEDMQDNSGTYGKIWEGSSKCNINNFIFHKVLGKGSFGKVLLGELKGRGEYFAIKALKKDVVLIDDDVECTMVEKRVLTLAAENPFLTHLICTFQTKDHLFFVMEFLNGGDLMYHIQDKGRFELYRATFYAAEIMCGLQFLHSKGIIYRDLKLDNVLLDRDGHIKIADFGMCKENIFGESRASTFCGTPDYIAPEILQGLKYTFSVDWWSFGVLLYEMLIGQSPFHGDDEDELFESIRVDTPHYPRWITKESKDILEKLFEREPTKRLGVTGNIKIHPFFKTINWTLLEKRRLEPPFRPKVKSPRDYSNFDQEFLNEKARLSYSDKNLIDSMDQSAFAGFSFVNPKFEHLLED

SEQ ID NO: 101 - protein, 457 aa, Homo sapiens
MSKPHSEAGTAFIQTQQLHAAMADTFLEHMCRLDIDSPPITARNTGIICTIGPASRSVELKKGATLKITLDNAYMEKCDENILWLDYKNICKVVEVGSKIYVDDGLISLQVKQKGADFLVTEVENGGSLGSKKGVNLPGAAVDLPAVSEKDIQDLKFGVEQDVDMVFASFIRKASDVHEVRKVLGEKGKNIKIISKIENHEGVRRFDEILEASDGIMVARGDLGIEIPAEKVFLAQKMMIGRCNRAGKPVICATQMLESMIKKPRPTRAEGSDVANAVLDGADCIMLSGETAKGDYPLEAVRMQHLIAREAEAAIYHLQLFEELRRLAPITSDPTEATAVGAVEASFKCCSGAIIVLTKSGRSAHQVARYRPRAPIIAVTRNPQTARQAHLYRGIFPVLCKDPVQEAWAEDVDLRVNFAMNVGKARGFFKKGDVVIVLTGWRPGSGFTNTMRVVPVP

SEQ ID NO: 102 - protein, 3259 aa, Homo sapiens
MLSRLSGLANVVLHELSGDDDTDQNMRAPLDPELHQESDMEFNNTTQEDVQERLAYAEQLVVELKDIIRQKDVQLQQKDEALQEERKAADNKIKKLKLHAKAKLTSLNKYIEEMKAQGGTVLPTEPQSEEQLSKHDKSSTEEEMEIEKIKHKLQEKEELISTLQAQLTQAQAEQPAQSSTEMEEFVMMKQQLQEKEEFISTLQAQLSQTQAEQAAQQVVREKDARFETQVRLHEDELLQLVTQADVETEMQQKLRVLQRKLEEHEESLVGRAQVVDLLQQELTAAEQRNQILSQQLQQMEAEHNTLRNTVETEREESKILLEKMELEVAERKLSFHNLQEEMHHLLEQFEQAGQAQAELESRYSALEQKHKAEMEEKTSHILSLQKTGQELQSACDALKDQNSKLLQDKNEQAVQSAQTIQQLEDQLQQKSKEISQFLNRLPLQQHETASQTSFPDVYNEGTQAVTEENIASLQKRVVELENEKGALLLSSIELEELKAENEKLSSQITLLEAQNRTGEADREVSEISIVDIANKRSSSAEESGQDVLENTFSQKHKELSVLLLEMKEAQEEIAFLKLQLQGKRAEEADHEVLDQKEMKQMEGEGIAPIKMKVFLEDTGQDFPLMPNEESSLPAVEKEQASTEHQSRTSEEISLNDAGVELKSTKQDGDKSLSAVPDIGQCHQDELERLKSQILELELNFHKAQEIYEKNLDEKAKEISNLNQLIEEFKKNADNNSSAFTALSEERDQLLSQVKELSMVTELRAQVKQLEMNLAEAERQRRLDYESQTAHDNLLTEQIHSLSIEAKSKDVKIEVLQNELDDVQLQFSEQSTLIRSLQSQLQNKESEVLEGAERVRHISSKVEELSQALSQKELEITKMDQLLLEKKRDVETLQQTIEEKDQQVTEISFSMTEKMVQLNEEKFSLGVEIKTLKEQLNLLSRAEEAKKEQVEEDNEVSSGLKQNYDEMSPAGQISKEELQHEFDLLKKENEQRKRKLQAALINRKELLQRVSRLEEELANLKDESKKEIPLSETERGEVEEDKENKEYSEKCVTSKCQEIEIYLKQTISEKEVELQHIRKDLEEKLAAEEQFQALVKQMNQTLQDKTNQIDLLQAEISENQAIIQKLITSNTDASDGDSVALVKETVVISPPCTGSSEHWKPELEEKILALEKEKEQLQKKLQEALTSRKAILKKAQEKERHLREELKQQKDDYNRLQEQFDEQSKENENIGDQLRQLQIQVRESIDGKLPSTDQQESCSSTPGLEEPLFKATEQHHTQPVLESNLCPDWPSHSEDASALQGGTSVAQIKAQLKEIEAEKVELELKVSSTTSELTKKSEEVFQLQEQINKQGLEIESLKTVSHEAEVHAESLQQKLESSQLQIAGLEHLRELQPKLDELQKLISKKEEDVSYLSGQLSEKEAALTKIQTEIIEQEDLIKALHTQLEMQAKEHDERIKQLQVELCEMKQKPEEIGEESRAKQQIQRKLQAALISRKEALKENKSLQEELSLARGTIERLTKSLADVESQVSAQNKEKDTVLGRLALLQEERDKLITEMDRSLLENQSLSSSCESLKLALEGLTEDKEKLVKEIESLKSSKIAESTEWQEKHKELQKEYEILLQSYENVSNEAERIQHVVEAVRQEKQELYGKLRSTEANKKETEKQLQEAEQEMEEMKEKMRKFAKSKQQKILELEEENDRLRAEVHPAGDTAKECMETLLSSNASMKEELERVKMEYETLSKKFQSLMSEKDSLSEEVQDLKHQIEGNVSKQANLEATEKHDNQTNVTEEGTQSIPGETEEQDSLSMSTRPTCSESVPSAKSANPAVSKDFSSHDEINNYLQQIDQLKERIAGLEEEKQKNKEFSQTLENEKNTLLSQISTKDGELKMLQEEVTKMNLLNQQIQEELSRVTKLKETAEEEKDDLEERLMNQLAELNGSIGNYCQDVTDAQIKNELLESEMKNLKKCVSELEEEKQQLVKEKTKVESEIRKEYLEKIQGAQKEPGNKSHAKELQELLKEKQQEVKQLQKDCIRYQEKISALERTVKALEFVQTESQKDLEITKENLAQAVEHRKKAQAELASFKVLLDDTQSEAARVLADNLKLKKELQSNKESVKSQMKQKDEDLERRLEQAEEKHLKEKKNMQEKLDALRREKVHLEETIGEIQVTLNKKDKEVQQLQENLDSTVTQLAAFTKSMSSLQDDRDRVIDEAKKWERKFSDAIQSKEEEIRLKEDNCSVLKDQLRQMSIHMEELKINISRLEHDKQIWESKAQTEVQLQQKVCDTLQGENKELLSQLEETRHLYHSSQNELAKLESELKSLKDQLTDLSNSLEKCKEQKGNLEGIIRQQEADIQNSKFSYEQLETDLQASRELTSRLHEEINMKEQKIISLLSGKEEAIQVAIAELRQQHDKEIKELENLLSQEEEENIVLEEENKKAVDKTNQLMETLKTIKKENIQQKAQLDSFVKSMSSLQNDRDRIVGDYQQLEERHLSIILEKDQLIQEAAAENNKLKEEIRGLRSHMDDLNSENAKLDAELIQYREDLNQVITIKDSQQKQLLEVQLQQNKELENKYAKLEEKLKESEEANEDLRRSFNALQEEKQDLSKEIESLKVSISQLTRQVTALQEEGTLGLYHAQLKVKEEEVHRLSALFSSSQKRIAELEEELVCVQKEAAKKVGEIEDKLKKELKHLHHDAGIMRNETETAEERVAELARDLVEMEQKLLMVTKENKGLTAQIQSFGRSMSSLQNSRDHANEELDELKRKYDASLKELAQLKEQGLLNRERDALLSETAFSMNSTEENSLSHLEKLNQQLLSKDEQLLHLSSQLEDSYNQVQSFSKAMASLQNERDHLWNELEKFRKSEEGKQRSAAQPSTSPAEVQSLKKAMSSLQNDRDRLLKELKNLQQQYLQINQEITELHPLKAQLQEYQDKTKAFQIMQEELRQENLSWQHELHQLRMEKSSWEIHERRMKEQYLMAISDKDQQLSHLQNLIRELRSSSSQTQPLKVQYQRQASPETSASPDGSQNLVYETELLRTQLNDSLKEIHQKELRIQQLNSNFSQLLEEKNTLSIQLCDTSQSLRENQQHYGDLLNHCAVLEKQVQELQAGPLNIDVAPGAPQEKNGVHRKSDPEELREPQQSFSEAQQQLCNTRQEVNELRKLLEEERDQRVAAENALSVAEEQIRRLEHSEWDSSRTPIIGSCGTQEQALLIDLTSNSCRRTRSGVGWKRVLRSLCHSRTRVPLLAAIYFLMIHVLLILCFTGHL

SEQ ID NO: 103 - protein, 156 aa, Homo sapiens
MALEKSLVRLLLLVLILLVLGWVQPSLGKESRAKKFQRQHMDSDSSPSSSSTYCNQMMRRRNMTQGRCKPVNTFVHEPLVDVQNVCFQEKVTCKNGQGNCYKSNSSMHITDCRLTNGSRYPNCAYRTSPKERHIIVACEGSPYVPVHFDASVEDST

SEQ ID NO: 104 - protein, 1941 aa, Homo sapiens
MAQGSGGREGALRTPAGGWHSPPSPDMQELLRSVERDLSIDPRQLAPAPGGTHVVALVPARWLASLRDRRLPLGPCPRAEGLGEAEVRTLLQRSVQRLPAGWTRVEVHGLRKRRLSYPLGGGLPFEDGSCGPETLTRFMQEVAAQNYRNLWRHAYHTYGQPYSHSPAPSAVPALDSVRQALQRVYGCSFLPVGETTQCPSYAREGPCPPRGSPACPSLLRAEALLESPEMLYVVHPYVQFSLHDVVTFSPAKLTNSQAKVLFILFRVLRAMDACHRQGLACGALSLYHIAVDEKLCSELRLDLSAYERPEEDENEEAPVARDEAGIVSQEEQGGQPGQPTGQEELRSLVLDWVHGRISNFHYLMQLNRLAGRRQGDPNYHPVLPWVVDFTTPHGRFRDLRKSKFRLNKGDKQLDFTYEMTRQAFVAGGAGGGEPPHVPHHISDVLSDITYYVYKARRTPRSVLCGHVRAQWEPHEYPASMERMQNWTPDECIPEFYTDPSIFRSIHPDMPDLDVPAWCSSSQEFVAAHRALLESREVSRDLHHWIDLTFGYKLQGKEAVKEKNVCLHLVDAHTHLASYGVVQLFDQPHPQRLAGAPALAPEPPLIPKLLVQTIQETTGREDFTENPGQLPNGVGRPVLEATPCEASWTRDRPVAGEDDLEQATEALDSISLAGKAGDQLGSSSQASPGLLSFSVASASRPGRRNKAAGADPGEGEEGRILLPEGFNPMQALEELEKTGNFLAKGLGGLLEVPEQPRVQPAVPLQCLLHRDMQALGVLLAEMVFATRVRTLQPDAPLWVRFQAVRGLCTRHPKEVPVSLQPVLDTLLQMSGPEVPMGAERGKLDQLFEYRPVSQGLPPPCPSQLLSPFSSVVPFPPYFPALHRFILLYQARRVEDEAQGRELVFALWQQLGAVLKDITPEGLEILLPFVLSLMSEEHTAVYTAWYLFEPVAKALGPKNANKYLLKPLIGAYESPCQLHGRFYLYTDCFVAQLMVRLGLQAFLTHLLPHVLQVLAGAEASQEESKDLAGAAEEEESGLPGAGPGSCAFGEEIPMDGEPPASSGLGLPDYTSGVSFHDQADLPETEDFQAGLYVTESPQPQEAEAVSLGRLSDKSSTSETSLGEERAPDEGGAPVDKSSLRSGDSSQDLKQSEGSEEEEEEEDSCVVLEEEEGEQEEVTGASELTLSDTVLSMETVVAGGSGGDGEEEEEALPEQSEGKEQKILLDTACKMVRWLSAKLGPTVASRHVARNLLRLLTSCYVGPTRQQFTVSSGESPPLSAGNIYQKRPVLGDIVSGPVLSCLLHIARLYGEPVLTYQYLPYISYLVAPGSASGPSRLNSRKEAGLLAAVTLTQKIIVYLSDTTLMDILPRISHEVLLPVLSFLTSLVTGFPSGAQARTILCVKTISLIALICLRIGQEMVQQHLSEPVATFFQVFSQLHELRQQDLKLDPAGRGEGQLPQVVFSDGQQRPVDPALLDELQKVFTLEMAYTIYVPFSCLLGDIIRKIIPNHELVGELAALYLESISPSSRNPASVEPTMPGTGPEWDPHGGGCPQDDGHSGTFGSVLVGNRIQIPNDSRPENPGPLGPISGVGGGGLGSGSDDNALKQELPRSVHGLSGNWLAYWQYEIGVSQQDAHFHFHQIRLQSFPGHSGAVKCVAPLSSEDFFLSGSKDRTVRLWPLYNYGDGTSETAPRLVYTQHRKSVFFVGQLEAPQHVVSCDGAVHVWDPFTGKTLRTVEPLDSRVPLTAVAVMPAPHTSITMASSDSTLRFVDCRKPGLQHEFRLGGGLNPGLVRALAISPSGRSVVAGFSSGFMVLLDTRTGLVLRGWPAHEGDILQIKAVEGSVLVSSSSDHSLTVWKELEQKPTHHYKSASDPIHTFDLYGSEVVTGTVSNKIGVCSLLEPPSQATTKLSSENFRGTLTSLALLPTKRHLLLGSDNGVIRLLA

SEQ ID NO: 105 - protein, 822 aa, Homo sapiens
MNTADQARVGPADDGPAPSGEEEGEGGGEAGGKEPAADAAPGPSAAFRLMVTRREPAVKLQYAVSGLEPLAWSEDHRVSVSTARSIAVLELICDVHNPGQDLVIHRTSVPAPLNSCLLKVGSKTEVAECKEKFAASKDPTVSQTFMLDRVFNPEGKALPPMRGFKYTSWSPMGCDANGRCLLAALTMDNRLTIQANLNRLQWVQLVDLTEIYGERLYETSYRLSKNEAPEGNLGDFAEFQRRHSMQTPVRMEWSGICTTQQVKHNNECRDVGSVLLAVLFENGNIAVWQFQLPFVGKESISSCNTIESGITSPSVLFWWEYEHNNRKMSGLIVGSAFGPIKILPVNLKAVKGYFTLRQPVILWKEMDQLPVHSIKCVPLYHPYQKCSCSLVVAARGSYVFWCLLLISKAGLNVHNSHVTGLHSLPIVSMTADKQNGTVYTCSSDGKVRQLIPIFTDVALKFEHQLIKLSDVFGSVRTHGIAVSPCGAYLAIITTEGMINGLHPVNKNYQVQFVTLKTFEEAAAQLLESSVQNLFKQVDLIDLVRWKILKDKHIPQFLQEALEKKIESSGVTYFWRFKLFLLRILYQSMQKTPSEALWKPTHEDSKILLVDSPGMGNADDEQQEEGTSSKQVVKQGLQERSKEGDVEEPTDDSLPTTGDAGGREPMEEKLLEIQGKIEAVEMHLTREHMKRVLGEVYLHTWITENTSIPTRGLCNFLMSDEEYDDRTARVLIGHISKKMNKQTFPEHCSLCKEILPFTDRKQAVCSNGHIWLRCFLTYQSCQSLIYRRCLLHDSIARHPAPEDPDWIKRLLQSPCPFCDSPVF

SEQ ID NO: 106 - protein, 689 aa, Homo sapiens
MAAATASPRSLLVLLQVVVLALAQIRGPPGERGPPGPPGPPGVPGSDGIDGDNGPPGKAGPPGPKGEPGKAGPDGPDGKPGIDGLTGAKGEPGPMGIPGVKGQPGLPGPPGLPGPGFAGPPGPPGPVGLPGEIGIRGPKGDPGPDGPSGPPGPPGKPGRPGTIQGLEGSADFLCPTNCPPGMKGPPGLQGVKGHAGKRGILGDPGHQGKPGPKGDVGASGEQGIPGPPGPQGIRGYPGMAGPKGETGPHGYKGMVGAIGATGPPGEEGPRGPPGRAGEKGDEGSPGIRGPQGITGPKGATGPPGINGKDGTPGTPGMKGSAGQAGQPGSPGHQGLAGVPGQPGTKGGPGDQGEPGPQGLPGFSGPPGKEGEPGPRGEIGPQGIMGQKGDQGERGPVGQPGPQGRQGPKGEQGPPGIPGPQGLPGVKGDKGSPGKTGPRGKVGDPGVAGLPGEKGEKGESGEPGPKGQQGVRGEPGYPGPSGDAGAPGVQGYPGPPGPRGLAGNRGVPGQPGRQGVEGRDATDQHIVDVALKMLQEQLAEVAVSAKREALGAVGMMGPPGPPGPPGYPGKQGPHGHPGPRGVPGIVGAVGQIGNTGPKGKRGEKGDPGEVGRGHPGMPGPPGIPGLPGRPGQAINGKDGDRGSPGAPGEAGRPGLPGPVGLPGFCEPAACLGASAYASARLTEPGSIKGP

SEQ ID NO: 107 - protein, 256 aa, Homo sapiens
MASGRPEELWEAVVGAAERFRARTGTELVLLTAAPPPPPRPGPCAYAAHGRGALAEAARRCLHDIALAHRAATAARPPAPPPAPQPPSPTPSPPRPTLAREDNEEDEDEPTETETSGEQLGISDNGGLFVMDEDATLQDLPPFCESDPESTDDGSLSEETPAGPPTCSVPPASALPTQQYAKSLPVSVPVWGFKEKRTEARSSDEENGPPSSPDLDRIAASMRALVLREAEDTQVFGDLPRPRLNTSDFQKLKRKY

SEQ ID NO: 108 - protein, 1231 aa, Homo sapiens
MRLLAKIICLMLWAICVAEDCNELPPRRNTEILTGSWSDQTYPEGTQAIYKCRPGYRSLGNVIMVCRKGEWVALNPLRKCQKRPCGHPGDTPFGTFTLTGGNVFEYGVKAVYTCNEGYQLLGEINYRECDTDGWTNDIPICEVVKCLPVTAPENGKIVSSAMEPDREYHFGQAVRFVCNSGYKIEGDEEMHCSDDGFWSKEKPKCVEISCKSPDVINGSPISQKIIYKENERFQYKCNMGYEYSERGDAVCTESGWRPLPSCEEKSCDNPYIPNGDYSPLRIKHRTGDEITYQCRNGFYPATRGNTAKCTSTGWIPAPRCTLKPCDYPDIKHGGLYHENMRRPYFPVAVGKYYSYYCDEHFETPSGSYWDHIHCTQDGWSPAVPCLRKCYFPYLENGYNQNHGRKFVQGKSIDVACHPGYALPKAQTTVTCMENGWSPTPRCIRVKTCSKSSIDIENGFISESQYTYALKEKAKYQCKLGYVTADGETSGSITCGKDGWSAQPTCIKSCDIPVFMNARTKNDFTWFKLNDTLDYECHDGYESNTGSTTGSIVCGYNGWSDLPICYERECELPKIDVHLVPDRKKDQYKVGEVLKFSCKPGFTIVGPNSVQCYHFGLSPDLPICKEQVQSCGPPPELLNGNVKEKTKEEYGHSEVVEYYCNPRFLMKGPNKIQCVDGEWTTLPVCIVEESTCGDIPELEHGWAQLSSPPYYYGDSVEFNCSESFTMIGHRSITCIHGVWTQLPQCVAIDKLKKCKSSNLIILEEHLKNKKEFDHNSNIRYRCRGKEGWIHTVCINGRWDPEVNCSMAQIQLCPPPPQIPNSHNMTTTLNYRDGEKVSVLCQENYLIQEGEEITCKDGRWQSIPLCVEKIPCSQPPQIEHGTINSSRSSQESYAHGTKLSYTCEGGFRISEENETTCYMGKWSSPPQCEGLPCKSPPEISHGVVAHMSDSYQYGEEVTYKCFEGFGIDGPAIAKCLGEKWSHPPSCIKTDCLSLPSFENAIPMGEKKDVYKAGEQVTYTCATYYKMDGASNVTCINSRWTGRPTCRDTSCVNPPTVQNAYIVSRQMSKYPSGERVRYQCRSPYEMFGDEEVMCLNGNWTEPPQCKDSTGKCGPPPPIDNGDITSFPLSVYAPASSVEYQCQNLYQLEGNKRITCRNGQWSEPPKCLHPCVISREIMENYNIALRWTAKQKLYSRTGESVEFVCKRGYRLSSRSHTLRTTCWDGKLEYPTCAKR

SEQ ID NO: 109 - protein, 562 aa, Homo sapiens
MRPEPGGCCCRRTVRANGCVANGEVRNGYVRSSAAAAAAAAAGQIHHVTQNGGLYKRPFNEAFEETPMLVAVLTYVGYGVLTLFGYLRDFLRYWRIEKCHHATEREEQKDFVSLYQDFENFYTRNLYMRIRDNWNRPICSVPGARVDIMERQSHDYNWSFKYTGNIIKGVINMGSYNYLGFARNTGSCQEAAAKVLEEYGAGVCSTRQEIGNLDKHEELEELVARFLGVEAAMAYGMGFATNSMNIPALVGKGCLILSDELNHASLVLGARLSGATIRIFKHNNMQSLEKLLKDAIVYGQPRTRRPWKKILILVEGIYSMEGSIVRLPEVIALKKKYKAYLYLDEAHSIGALGPTGRGVVEYFGLDPEDVDVMMGTFTKSFGASGGYIGGKKELIDYLRTHSHSAVYATSLSPPVVEQIITSMKCIMGQDGTSLGKECVQQLAENTRYFRRRLKEMGFIIYGNEDSPVVPLMLYMPAKIGAFGREMLKRNIGVVVVGFPATPIIESRARFCLSAAHTKEILDTALKEIDEVGDLLQLKYSRHRLVPLLDRPFDETTYEETED

SEQ ID NO: 110 - protein, 683 aa, Homo sapiens
MALFVRLLALALALALGPAATLAGPAKSPYQLVLQHSRLRGRQHGPNVCAVQKVIGTNRKYFTNCKQWYQRKICGKSTVISYECCPGYEKVPGEKGCPAALPLSNLYETLGVVGSTTTQLYTDRTEKLRPEMEGPGSFTIFAPSNEAWASLPAEVLDSLVSNVNIELLNALRYHMVGRRVLTDELKHGMTLTSMYQNSNIQIHHYPNGIVTVNCARLLKADHHATNGVVHLIDKVISTITNNIQQIIEIEDTFETLRAAVAASGLNTMLEGNGQYTLLAPTNEAFEKIPSETLNRILGDPEALRDLLNNHILKSAMCAEAIVAGLSVETLEGTTLEVGCSGDMLTINGKAIISNKDILATNGVIHYIDELLIPDSAKTLFELAAESDVSTAIDLFRQAGLGNHLSGSERLTLLAPLNSVFKDGTPPIDAHTRNLLRNHIIKDQLASKYLYHGQTLETLGGKKLRVFVYRNSLCIENSCIAAHDKRGRYGTLFTMDRVLTPPMGTVMDVLKGDNRFSMLVAAIQSAGLTETLNREGVYTVFAPTNEAFRALPPRERSRLLGDAKELANILKYHIGDEILVSGGIGALVRLKSLQGDKLEVSLKNNVVSVNKEPVAEPDIMATNGVVHVITNVLQPPANRPQERGDELADSALEIFKQASAFSRASQRSVRLAPVYQKLLERMKH

SEQ ID NO: 111 - protein, 1342 aa, Homo sapiens
MKRIFSLLEKTWLGAPIQFAWQKTSGNYLAVTGADYIVKIFDRHGQKRSEINLPGNCVAMDWDKDGDVLAVIAEKSSCIYLWDANTNKTSQLDNGMRDQMSFLLWSKVGSFLAVGTVKGNLLIYNHQTSRKIPVLGKHTKRITCGCWNAENLLALGGEDKMITVSNQEGDTIRQTQVRSEPSNMQFFLMKMDDRTSAAESMISVVLGKKTLFFLNLNEPDNPADLEFQQDFGNIVCYNWYGDGRIMIGFSCGHFVVISTHTGELGQEIFQARNHKDNLTSIAVSQTLNKVATCGDNCIKIQDLVDLKDMYVILNLDEENKGLGTLSWTDDGQLLALSTQRGSLHVFLTKLPILGDACSTRIAYLTSLLEVTVANPVEGELPITVSVDVEPNFVAVGLYHLAVGMNNRAWFYVLGENAVKKLKDMEYLGTVASICLHSDYAAALFEGKVQLHLIESEILDAQEERETRLFPAVDDKCRILCHALTSDFLIYGTDTGVVQYFYIEDWQFVNDYRHPVSVKKIFPDPNGTRLVFIDEKSDGFVYCPVNDATYEIPDFSPTIKGVLWENWPMDKGVFIAYDDDKVYTYVFHKDTIQGAKVILAGSTKVPFAHKPLLLYNGELTCQTQSGKVNNIYLSTHGFLSNLKDTGPDELRPMLAQNLMLKRFSDAWEMCRILNDEAAWNELARACLHHMEVEFAIRVYRRIGNVGIVMSLEQIKGIEDYNLLAGHLAMFTNDYNLAQDLYLASSCPIAALEMRRDLQHWDSALQLAKHLAPDQIPFISKEYAIQLEFAGDYVNALAHYEKGITGDNKEHDEACLAGVAQMSIRMGDIRRGVNQALKHPSRVLKRDCGAILENMKQFSEAAQLYEKGLYYDKAASVYIRSKNWAKVGDLLPHVSSPKIHLQYAKAKEADGRYKEAVVAYENAKQWQSVIRIYLDHLNNPEKAVNIVRETQSLDGAKMVARFFLQLGDYGSAIQFLVMSKCNNEAFTLAQQHNKMEIYADIIGSEDTTNEDYQSIALYFEGEKRYLQAGKFFLLCGQYSRALKHFLKCPSSEDNVAIEMAIETVGQAKDELLTNQLIDHLLGENDGMPKDAKYLFRLYMALKQYREAAQTAIIIAREEQSAGNYRNAHDVLFSMYAELKSQKIKIPSEMATNLMILHSYILVKIHVKNGDHMKGARMLIRVANNISKFPSHIVPILTSTVIECHRAGLKNSAFSFAAMLMRPEYRSKIDAKYKKKIEGMVRRPDISEIEEATTPCPFCKFLLPECELLCPGCKNSIPYCIATGRHMLKDDWTVCPHCDFPALYSELKIMLNTESTCPMCSERLNAAQLKKISDCTQYLRTEEEL

SEQ ID NO: 112 - protein, 544 aa, Homo sapiens
MSRCAQAAEVAATVPGAGVGNVGLRPPMVPRQASFFPPPVPNPFVQQTQIGSARRVQIVLLGIILLPIRVLLVALILLLAWPFAAISTVCCPEKLTHPITGWRRKITQTALKFLGRAMFFSMGFIVAVKGKIASPLEAPVFVAAPHSTFFDGIACVVAGLPSMVSRNENAQVPLIGRLLRAVQPVLVSRVDPDSRKNTINEIIKRTTSGGEWPQILVFPEGTCTNRSCLITFKPGAFIPGVPVQPVLLRYPNKLDTVTWTWQGYTFIQLCMLTFCQLFTKVEVEFMPVQVPNDEEKNDPVLFANKVRNLMAEALGIPVTDHTYEDCRLMISAGQLTLPMEAGLVEFTKISRKLKLDWDGVRKHLDEYASIASSSKGGRIGIEEFAKYLKLPVSDVLRQLFALFDRNHDGSIDFREYVIGLAVLCNPSNTEEIIQVAFKLFDVDEDGYITEEEFSTILQASLGVPDLDVSGLFKEIAQGDSISYEEFKSFALKHPEYAKIFTTYLDLQTCHVFSLPKEVQTTPSTASNKVSPEKHEESTSDKKDD

SEQ ID NO: 113 - protein, 182 aa, Homo sapiens
MWPPDPDPDPDPEPAGGSRPGPAVPGLRALLPARAFLCSLKGRLLLAESGLSFITFICYVASSASAFLTAPLLEFLLALYFLFADAMQLNDKWQGLCWPMMDFLRCVTAALIYFAISITAIAKYSDGASKAAGVFGFFATIVFATDFYLIFNDVAKFLKQGDSADETTAHKTEEENSDSDSD

SEQ ID NO: 114 - protein, 612 aa, Homo sapiens
MAAAGRLPSSWALFSPLLAGLALLGVGPVPARALHNVTAELFGAEAWGTLAAFGDLNSDKQTDLFVLRERNDLIVFLADQNAPYFKPKVKVSFKNHSALITSVVPGDYDGDSQMDVLLTYLPKNYAKSELGAVIFWGQNQTLDPNNMTILNRTFQDEPLIMDFNGDLIPDIFGITNESNQPQILLGGNLSWHPALTTTSKMRIPHSHAFIDLTEDFTADLFLTTLNATTSTFQFEIWENLDGNFSVSTILEKPQNMMVVGQSAFADFDGDGHMDHLLPGCEDKNCQKSTIYLVRSGMKQWVPVLQDFSNKGTLWGFVPFVDEQQPTEIPIPITLHIGDYNMDGYPDALVILKNTSGSNQQAFLLENVPCNNASCEEARRMFKVYWELTDLNQIKDAMVATFFDIYEDGILDIVVLSKGYTKNDFAIHTLKNNFEADAYFVKVIVLSGLCSNDCPRKITPFGVNQPGPYIMYTTVDANGYLKNGSAGQLSQSAHLALQLPYNVLGLGRSANFLDHLYVGIPRPSGEKSIRKQEWTAIIPNSQLIVIPYPHNVPRSWSAKLYLTPSNIVLLTAIALIGVCVFILAIIGILHWQEKKADDREKRQEAHRFHFDAM

SEQ ID NO: 115 - protein, 1213 aa, Homo sapiens
MRSRNQGGESASDGHISCPKPSIIGNAGEKSLSEDAKKKKKSNRKEDDVMASGTVKRHLKTSGECERKTKKSLELSKEDLIQLLSIMEGELQAREDVIHMLKTEKTKPEVLEAHYGSAEPEKVLRVLHRDAILAQEKSIGEDVYEKPISELDRLEEKQKETYRRMLEQLLLAEKCHRRTVYELENEKHKHTDYMNKSDDFTNLLEQERERLKKLLEQEKAYQARKEKENAKRLNKLRDELVKLKSFALMLVDERQMHIEQLGLQSQKVQDLTQKLREEEEKLKAITSKSKEDRQKLLKLEVDFEHKASRFSQEHEEMNAKLANQESHNRQLRLKLVGLTQRIEELEETNKNLQKAEEELQELRDKIAKGECGNSSLMAEVENLRKRVLEMEGKDEEITKTESQCRELRKKLQEEEHHSKELRLEVEKLQKRMSELEKLEEAFSKSKSECTQLHLNLEKEKNLTKDLLNELEVVKSRVKELECSESRLEKAELSLKDDLTKLKSFTVMLVDERKNMMEKIKQEERKVDGLNKNFKVEQGKVMDVTEKLIEESKKLLKLKSEMEEKVYNLTRERDELIGKLKSEEEKSSELSCSVDLLKKRLDGIEEVEREITRGRSRKGSELTCPEDNKIKELTLEIERLKKRLQQLEVVEGDLMKTEDEYDQLEQKFRTEQDKANFLSQQLEEIKHQIAKNKAIEKGEVVSQEAELRHRFRLEEAKSRDLKAEVQALKEKIHELMNKEDQLSQLQVDYSVLQQRFMEEENKNKNMGQEVLNLTKELELSKRYSRALRPSVNGRRMVDVPVTSTGVQTDAVSGEAAEEETPAVFIRKSFQEENHIMSNLRQVGLKKPVERSSVLDRYPPAANELTMRKSWIPWMRKRENGPSITQEKGPRTNSSPGHPGEVVLSPKQGQPLHIRVTPDHENSTATLEITSPTSEEFFSSTTVIPTLGNQKPRITIIPSPNVMPQKQKSGDTTLGPERAMSPVTITTFSREKTPESGRGAFADRPTSPIQIMTVSTSAAPAEIAVSPESQEMPMGRTILKVTPEKQTVPTPVRKYNSNANIITTEDNKIHIHLGSQFKRSPGTSGEGVSPVITVRPVNVTAEKEVSTGTVLRSPRNHLSSRPGASKVTSTITITPVTTSSARGTQSVSGQDGSSQRPTPTRIPMSKGMKAGKPVVAAPGAGNLTKFEPRAETQSMKIELKKSAASSTTSLGGGKG

SEQ ID NO: 116 - protein, 643 aa, Homo sapiens
MASVALEDVAVNFTREEWALLGPCQKNLYKDVMQETIRNLDCVGMKWKDQNIEDQYRYPRKNLRCRMLERFVESKDGTQCGETSSQIQDSIVTKNTLPGVGPYESRMSGEVIMGHSSLNCYIRVGAGHKPYEYHECGEKPDTHKQRGKAFSYHNSLQTHERLHTGKKPYNCKECGKSFSSLGNLQRHMAVQRGDGPYKCKLCGKAFFWPSLLHMHERTHTGEKPYECKQCSKAFSFYSSYLRHERTHTGEKLYECKQCSKAFPDYSSCLRHERTHTGKKPYTCKQCGKAFSASTSLRRHETTHTDEKPYACQQCGKAFHHLGSFQRHMVMHTRDGPHKCKICGKGFDCPSSLKSHERTHTGEKLYECKQCGKALSHSSSFRRHMTMHTGDGPHKCKICGKAFVYPSVFQRHEKTHTAEKPYKCKQCGKAYRISSSLRRHETTHTGEKPYKCKCGKAFIDFYSFQNHKTTHAGEKPYECKECGKAFSCFQYLSQHRRTHTGEKPYECNTCKKAFSHFGNLKVHERIHSGEKPYECKECGKAFSWLTCFLRHERIHMREKPYECQQCGKAFTHSRFLQGHEKTHTGENPYECKECGKAFASLSSLHRHKKTHWKKTHTGENPYGCKECGKAFASLSSLHRHKKTH

SEQ ID NO: 117 - protein, 337 aa, Homo sapiens
MNPESSIFIEDYLKYFQDQVSRENLLQLLTDDEAWNGFVAAAELPRDEADELRKALNKLASHMVMKDKNRHDKDQQHRQWFLKEFPRLKRELEDHIRKLRALAEEVEQVHRGTTIANVVSNSVGTTSGILTLLGLGLAPFTEGISFVLLDTGMGLGAAAAVAGITCSVVELVNKLRARAQARNLDQSGTNVAKVMKEFVGGNTPNVLTLVDNWYQVTQGIGRNIRAIRRARANPQLGAYAPPPHIIGRISAEGGEQVERVVEGPAQAMSRGTMIVGAATGGILLLLDVVSLAYESKHLLEGAKSESAEELKKRAQELEGKLNFLTKIHEMLQPGQDQ

SEQ ID NO: 118 - protein, 463 aa, Homo sapiens
MGRKKIQITRIMDERNRQVTFTKRKFGLMKKAYELSVLCDCEIALIIFNSTNKLFQYASTDMDKVLLKYTEYNEPHESRTNSDIVEALNKKENKGCESPDPDSSYALTPRTEEKYKKINEEFDNMIKSHKIPAVPPPNFEMPVSIPVSSHNSLVYSNPVSSLGNPNLLPLAHPSLQRNSMSPGVTHRPPSAGNTGGLMGGDLTSGAGTSAGNGYGNPRNSPGLLVSPGNLNKNMQAKSPPPMNLGMNNRKPDLRVLIPPGSKNTMPSVNQRINNSQSAQSLATPVVSVATPTLPGQGMGGYPSAISTTYGTEYSLSSADLSSLSGFNTASALHLGSVTGWQQQHLHNMPPSALSQLGACTSTHLSQSSNLSLPSTQSLNIKSEPVSPPRDRTTTPSRYPQHTRHEAGRSPVDSLSSCSSSYDGSDREDHRNEFHSPIGLTRPSPDERESPSVKRMRLSEGWAT

SEQ ID NO: 119 - protein, 704 aa, Homo sapiens
MANENHGSPREEASLLSHSPGTSNQSQPCSPKPIRLVQDLPEELVHAGWEKCWSRRENRPYYFNRFTNQSLWEMPVLGQHDVISDPLGLNATPLPQDSSLVETPPAENKPRKRQLSEEQPSGNGVKKPKIEIPVTPTGQSVPSSPSIPGTPTLKMWGTSPEDKQQAALLRPTEVYWDLDIQTNAVIKHRGPSEVLPPHPEVELLRSQLILKLRQHYRELCQQREGIEPPRESFNRWMLERKVVDKGSDPLLPSNCEPVVSPSMFREIMNDIPIRLSRIKFREEAKRLLFKYAEAARRLIESRSASPDSRKVVKWNVEDTFSWLRKDHSASKEDYMDRLEHLRRQCGPHVSAAAKDSVEGICSKIYHISLEYVKRIREKHLAILKENNISEEVEAPEVEPRLVYCYPVRLAVSAPPMPSVEMHMENNVVCIRYKGEMVKVSRNYFSKLWLLYRYSCIDDSAFERFLPRVWCLLRRYQMMFGVGLYEGTGLQGSLPVHVFEALHRLFGVSFECFASPLNCYFRQYCSAFPDTDGYFGSRGPCLDFAPLSGSFEANPPFCEELMDAMVSHFERLLESSPEPLSFIVFIPEWREPPTPALTRMEQSRFKRHQLILPAFEHEYRSGSQHICKKEEMHYKAVHNTAVLFLQNDPGFAKWAPTPERLQELSAAYRQSGRSHSSGSSSSSSSEAKDRDSGREQGPSREPHPT

SEQ ID NO: 120 - protein, 396 aa, Homo sapiens
MSIVTVQLGQCGNQIGFEVFDALLSDSHSSQGLCSMRENEAYQASCKERFFSEEENGVPIARAVLVDMEPKVINQMLSKAAQSGQWKYGQHACFCQKQGSGNNWAYGYSVHGPRHEESIMNIIRKEVEKCDSFSGFFIIMSMAGGTGSGLGAFVTQNLEDQYSNSLKMNQIIWPYGTGEVIVQNYNSILTLSHLYRSSDALLLHENDAIHKICAKLMNIKQISFSDINQVLAHQLGSVFQPTYSAESSFHYRRNPLGDLMEHLVPHPEFKMLSVRNIPHMSENSLAYTTFTWAGLLKHLRQMLISNAKMEEGIDRHVWPPLSGLPPLSKMSLNKDLHFNTSIANLVILRGKDVQSADVGKKFRAYIHQYTKFGIEEEDFLDSFTSLEQVVASYCNL

SEQ ID NO: 121 - protein, 1158 aa, Homo sapiens
MTHGEELGSDVHQDSIVLTYLEGLLMHQAAGGSGTAVDKKSAGHNEEDQNFNISGSAFPTCQSNGPVLNTHTYQGSGMLHLKKARLLQSSEDWNAAKRKRLSDSIMNLNVKKEALLAGMVDSVPKGKQDSTLLASLLQSFSSRLQTVALSQQIRQSLKEQGYALSHDSLKVEKDLRCYGVASSHLKTLLKKSKVKDQKPDTNLPDVTKNLIRDRFAESPHHVGQSGTKVMSEPLSCAARLQAVASMVEKRASPATSPKPSVACSQLALLLSSEAHLQQYSREHALKTQNANQAASERLAAMARLQENGQKDVGSYQLPKGMSSHLNGQARTSSSKLMASKSSATVFQNPMGIIPSSPKNAGYKNSLERNNIKQAANNSLLLHLLKSQTIPKPMNGHSHSERGSIFEESSTPTTIDEYSDNNPSFTDDSSGDESSYSNCVPIDLSCKHRTEKSESDQPVSLDNFTQSLLNTWDPKVPDVDIKEDQDTSKNSKLNSHQKVTLLQLLLGHKNEENVEKNTSPQGVHNDVSKFNTQNYARTSVIESPSTNRTTPVSTPPLLTSSKAGSPINLSQHSLVIKWNSPPYVCSTQSEKLTNTASNHSMDLTKSKDPPGEKPAQNEGAQNSATFSASKLLQNLAQCGMQSSMSVEEQRPSKQLLTGNTDKPIGMIDRLNSPLLSNKTNAVEENKAFSSQPTGPEPGLSGSEIENLLERRTVLQLLLGNPNKGKSEKKEKTPLRDESTQEHSERALSEQILMVKIKSEPCDDLQIPNTNVHLSHDAKSAPFLGMAPAVQRSAPALPVSEDFKSEPVSPQDFSFSKNGLLSRLLRQNQDSYLADDSDRSHRNNEMALLESKNLCMVPKKRKLYTEPLENPFKKMKNNIVDAANNHSAPEVLYGSLLNQEELKFSRNDLEFKYPAGHGSASESEHRSWARESKSFNVLKQLLLSENCVRDLSPHRSNSVADSKKKGHKNNVTNSKPEFSISSLNGLMYSSTQPSSCMDNRTFSYPGVVKTPVSPTFPEHLGCAGSRPESGLLNGCSMPSEKGPIKWVITDAEKNEYEKDSPRLTKTNPILYYMLQKGGNSVTSRETQDKDIWREASSAESVSQVTAKEELLPTAETKASFFNLRSPYNSHMGNNASRPHSANGEVYGLLGSVLTIKKESE

SEQ ID NO: 122 - protein, 459 aa, Homo sapiens
MAPLCPSPWLPLLIPAPAPGLTVQLLLSLLLLVPVHPQRLPRMQEDSPLGGGSSGEDDPLGEEDLPSEEDSPREEDPPGEEDLPGEEDLPGEEDLPEVKPKSEEEGSLKLEDLPTVEAPGDPQEPQNNAHRDKEGDDQSHWRYGGDPPWPRVSPACAGRFQSPVDIRPQLAAFCPALRPLELLGFQLPPLPELRLRNNGHSVQLTLPPGLEMALGPGREYRALQLHLHWGAAGRPGSEHTVEGHRFPAEIHVVHLSTAFARVDEALGRPGGLAVLAAFLEEGPEENSAYEQLLSRLEEIAEEGSETQVPGLDISALLPSDFSRYFQYEGSLTTPPCAQGVIWTVFNQTVMLSAKQLHTLSDTLWGPGDSRLQLNFRATQPLNGRVIEASFPAGVDSSPRAAEPVQLNSCLAAGDILALVFGLLFAVTSVAFLVQMRRQHRRGTKGGVSYRPAEVAETGA

SEQ ID NO: 123 - protein, 501 aa, Homo sapiens
MPSASASRKSQEKPREIMDAAEDYAKERYGISSMIQSQEKPDRVLVRVRDLTIQKADEVVWVRARVHTSRAKGKQCFLVLRQQQFNVQALVAVGDHASKQMVKFAANINKESIVDVEGVVRKVNQKIGSCTQQDVELHVQKIYVISLAEPRLPLQLDDAVRPEAEGEEEGRATVNQDTRLDNRVIDLRTSTSQAVFRLQSGICHLFRETLINKGFVEIQTPKIISAASEGGANVFTVSYFKNNAYLAQSPQLYKQMCICADFEKVFSIGPVFRAEDSNTHRHLTEFVGLDIEMAFNYHYHEVMEEIADTMVQIFKGLQERFQTEIQTVNKQFPCEPFKFLEPTLRLEYCEALAMLREAGVEMGDEDDLSTPNEKLLGHLVKEKYDTDFYILDKYPLAVRPFYTMPDPRNPKQSNSYDMFMRGEEILSGAQRIHDPQLLTERALHHGIDLEKIKAYIDSFRFGAPPHAGGGIGLERVTMLFLGLHNVRQTSMFPRDPKRLTP

SEQ ID NO: 124 - protein, 670 aa, Homo sapiens
MIQSSSTPTRDLAPKDRNGTSDPFVRVRYKGRTRETSIVKKSCYPRWNETFEFELQEGAMEALCVEAWDWDLVSRNDFLGKVVIDVQRLRVVQQEEGWFRLQPDQSKSRRHDEGNLGSLQLEVRLRDETVLPSSYYQPLVHLLCHEVKLGMQGPGQLIPLIEETTSTECRQDVATNLLKLFLGQGLAKDFLDLLFQLELSRTSETNTLFRSNSLASKSVESFLKVAGMQYLHGVLGPIINKVFEEKKYVELDPSKVEVKDVGCSGLHRPQTEAEVLEQSAQTLRAHLGALLSALSRSVRACPAVVRATFRQLFRRVRERFPGAQHENVPFIAVTSFLCLRFFSPAIMSPKLFHLRERHADARTSRTLLLLAKAVQNVGNMDTPASRAKEAWMEPLQPTVHQGVAQLKDFITKLVDIEEKDELDLQRTLSLQAPPVKEGPLFIHRTKGKGPLMSSSFKKLYFSLTTEALSFAKTPSSKKSALIKLANIRAAEKVEEKSFGGSHVMQVIYTDDAGRPQTAYLQCKCVNELNQWLSALRKVSINNTGLLGSYHPGVFRGDKWSCCHQKEKTGQGCDKTRSRVTLQEWNDPLDHDLEAQLIYRHLLGVEAMLWERHRELSGGAEAGTVPTSPGKVPEDSLARLLRVLQDLREAHSSSPAGSPPSEPNCLLELQT

SEQ ID NO: 125 - protein, 1473 aa, Homo sapiens
MAGGAWGRLACYLEFLKKEELKEFQLLLANKAHSRSSSGETPAQPEKTSGMEVASYLVAQYGEQRAWDLALHTWEQMGLRSLCAQAQEGAGHSPSFPYSPSEPHLGSPSQPTSTAVLMPWIHELPAGCTQGSERRVLRQLPDTSGRRWREISASLLYQALPSSPDHESPSQESPNAPTSTAVLGSWGSPPQPSLAPREQEAPGTQWPLDETSGIYYTEIREREREKSEKGRPPWAAVVGTPPQAHTSLQPHHHPWEPSVRESLCSTWPWKNEDFNQKFTQLLLLQRPHPRSQDPLVKRSWPDYVEENRGHLIEIRDLFGPGLDTQEPRIVILQGAAGIGKSTLARQVKEAWGRGQLYGDRFQHVFYFSCRELAQSKVVSLAELIGKDGTATPAPIRQILSRPERLLFILDGVDEPGWVLQEPSSELCLHWSQPQPADALLGSLLGKTILPEASFLITARTTALQNLIPSLEQARWVEVLGFSESSRKEYFYRYFTDERQAIRAFRLVKSNKELWALCLVPWVSWLACTCLMQQMKRKEKLTLTSKTTTTLCLHYLAQALQAQPLGPQLRDLCSLAAEGIWQKKTLFSPDDLRKHGLDGAIISTFLKMGILQEHPIPLSYSFIHLCFQEFFAAMSYVLEDEKGRGKHSNCIIDLEKTLEAYGIHGLFGASTTRFLLGLLSDEGEREMENIFHCRLSQGRNLMQWVPSLQLLLQPHSLESLHCLYETRNKTFLTQVMAHFEEMGMCVETDMELLVCTFCIKFSRHVKKLQLIEGRQHRSTWSPTMVVLFRWVPVTDAYWQILFSVLKVTRNLKELDLSGNSLSHSAVKSLCKTLRRPRCLLETLRLAGCGLTAEDCKDLAFGLRANQTLTELDLSFNVLTDAGAKHLCQRLRQPSCKLQRLQLVSCGLTSDCCQDLASVLSASPSLKELDLQQNNLDDVGVRLLCEGLRHPACKLIRLGLDQTTLSDEMRQELRALEQEKPQLLIFSRRKPSVMTPTEGLDTGEMSNSTSSLKRQRLGSERAASHVAQANLKLLDVSKIFPIAEIAEESSPEVVPVELLCVPSPASQGDLHTKPLGTDDDFWGPTGPVATEVVDKEKNLYRVHFPVAGSYRWPNTGLCFVMREAVTVEIEFCVWDQFLGEINPQHSWMVAGPLLDIKAEPGAVEAVHLPHFVALQGGHVDTSLFQMAHFKEEGMLLEKPARVELHHIVLENPSFSPLGVLLKMIHNALRFIPVTSVVLLYHRVHPEEVTFHLYLIPSDCSIRKAIDDLEMKFQFVRIHKPPPLTPLYMGCRYTVSGSGSGMLEILPKELELCYRSPGEDQLFSEFYVGHLGSGIRLQVKDKKDETLVWEALVKPGDLMPATTLIPPARIAVPSPLDAPQLLHFVDQYREQLIARVTSVEVVLDKLHGQVLSQEQYERVLAENTRPSQMRKLFSLSQSWDRKCKDGLYQALKETHPHLIMELWEKGSKKGLLPLSS

SEQ ID NO: 126 - protein, 263 aa, Homo sapiens
MFRNQYDNDVTVWSPQGRIHQIEYAMEAVKQGSATVGLKSKTHAVLVALKRAQSELAAHQKKILHVDNHIGISIAGLTADARLLCNFMRQECLDSRFVFDRPLPVSRLVSLIGSKTQIPTQRYGRRPYGVGLLIAGYDDMGPHIFQTCPSANYFDCRAMSIGARSQSARTYLERHMSEFMECNLNELVKHGLRALRETLPAEQDLTTKNVSIGIVGKDLEFTIYDDDDVSPFLEGLEERPQRKAQPAQPADEPAEKADEPMEH

SEQ ID NO: 127 - protein, 466 aa, Homo sapiens
MVRSVAWAGFMVLLMIPWGSAAKLVCYFTNWAQYRQGEARFLPKDLDPSLCTHLIYAFAGMTNHQLSTTEWNDETLYQEFNGLKKMNPKLKTLLAIGGWNFGTQKFTDMVATANNRQTFVNSAIRFLRKYSFDGLDLDWEYPGSQGSPAVDKERFTTLVQDLANAFQQEAQTSGKERLLLSAAVPAGQTYVDAGYEVDKIAQNLDFVNLMAYDFHGSWEKVTGHNSPLYKRQEESGAAASLNVDAAVQQWLQKGTPASKLILGMPTYGRSFTLASSSDTRVGAPATGSGTPGPFTKEGGMLAYYEVCSWKGATKQRIQDQKVPYIFRDNQWVGFDDVESFKTKVSYLKQKGLGGAMVWALDLDDFAGFSCNQGRYPLIQTLRQELSLPYLPSGTPELEVPKPGQPSEPEHGPSPGQDTFCQGKADGLYPNPRERSSFYSCAAGRLFQQSCPTGLVFSNSCKCCTWN

SEQ ID NO: 128 - protein, 627 aa, Homo sapiens
MARGSVSDEEMMELREAFAKVDTDGNGYISFNELNDLFKAACLPLPGYRVREITENLMATGDLDQDGRISFDEFIKIFHGLKSTDVAKTFRKAINKKEGICAIGGTSEQSSVGTQHSYSEEEKYAFVNWINKALENDPDCRHVIPMNPNTNDLFNAVGDGIVLCKMINLSVPDTIDERTINKKKLTPFTIQENLNLALNSASAIGCHVVNIGAEDLKEGKPYLVLGLLWQVIKIGLFADIELSRNEALIALLREGESLEDLMKLSPEELLLRWANYHLENAGCNKIGNFSTDIKDSKAYYHLLEQVAPKGDEEGVPAVVIDMSGLREKDDIQRAECMLQQAERLGCRQFVTATDVVRGNPKLNLAFIANLFNRYPALHKPENQDIDWGALEGETREERTFRNWMNSLGVNPRVNHLYSDLSDALVIFQLYEKIKVPVDWNRVNKPPYPKLGGNMKKLENCNYAVELGKNQAKFSLVGIGGQDLNEGNRTLTLALIWQLMRRYTLNILEEIGGGQKVNDDIIVNWVNETLREAKKSSSISSFKDPKISTSLPVLDLIDAIQPGSINYDLLKTENLNDDEKLNNAKYAISMARKIGARVYALPEDLVEVNPKMVMTVFACLMGKGMKRV

SEQ ID NO: 129 - protein, 3259 aa, Homo sapiens; identical to SEQ ID NO: 102

SEQ ID NO: 130 - protein, 689 aa, Homo sapiens; identical to SEQ ID NO: 106

SEQ ID NO: 131 - protein, 622 aa, Homo sapiens
MALRGTLRPLKVRRRREMLPQQVGFVCAVLALVCCASGLFGSLGHKTASASKRVLPDTWRNRKLMAPVNGTQTAKNCTDPAIHEFPTDLFSNKERQHGAVLLHILGALYMFYALAIVCDDFFVPSLEKICERLHLSEDVAGATFMAAGSSTPELFASVIGVFITHGDVGVGTIVGSAVFNILCIIGVCGLFAGQVVRLTWWAVCRDSVYYTISVIVLIVFIYDEQIVWWEGLVLIILYVFYILIMKYNVKMQAFFTVKQKSIANGNPVNSELEAGNDFYDGSYDDPSVPLLGQVKEKPQYGKNPVVMVDEIMSSSPPKFTFPEAGLRIMITNKFGPRTRLRMASRIIINERQRLINSANGVSSKPLQNGRHENIENGNVPVENPEDPQQNQEQQPPPQPPPPEPEPVEADFLSPFSVPEARGDKVKWVFTWPLIFLLCVTIPNCSKPRWEKFFMVTFITATLWIAVFSYIMVWLVTIIGYTLGIPDVIMGITFLAAGTSVPDCMASLIVARQGLGDMAVSNTIGSNVFDILVGLGVPWGLQTMVVNYGSTVKINSRGLVYSVVLLLGSVALTVLGIHLNKWRLDRKLGVYVLVLYAIFLCFSIMIEFNVFTFVNLPMCREDD

SEQ ID NO: 132 - protein, 1222 aa, Homo sapiens
MSEAPRFFVGPEDTEINPGNYRHFFHHADEDDEEEDDSPPERQIVVGICSMAKKSKSKPMKEILERISLFKYITVVVFEEEVILNEPVENWPLCDCLISFHSKGFPLDKAVAYAKLRNPFVINDLNMQYLIQDRREVYSILQAEGILLPRYAILNRDPNNPKECNLIEGEDHVEVNGEVFQKPFVEKPVSAEDHNVYIYYPTSAGGGSQRLFRKIGSRSSVYSPESNVRKTGSYIYEEFMPTDGTDVKVYTVGPDYAHAEARKSPALDGKVERDSEGKEVRYPVILNAREKLIAWKVCLAFKQTVCGFDLLRANGQSYVCDVNGFSFVKNSMKYYDDCAKILGNIVMRELAPQFHIPWSIPLEAEDIPIVPTTSGTMMELRCVIAVIRHGDRTPKQKMKMEVRHQKFFDLFEKCDGYKSGKLKLKKPKQLQEVLDIARQLLMELGQNNDSEIEENKPKLEQLKTVLEMYGHFSGINRKVQLTYLPHGCPKTSSEEEDSRREEPSLLLVLKWGGELTPAGRVQAEELGRAFRCMYPGGQGDYAGFPGCGLLRLHSTYRHDLKIYASDEGRVQMTAAAFAKGLLALEGELTPILVQMVKSANMNGLLDSDSDSLSSCQQRVKARLHEILQKDRDFTAEDYEKLTPSGSISLIKSMHLIKNPVKTCDKVYSLIQSLTSQIRHRMEDPKSSDIQLYHSETLELMLRRWSKLEKDFKTKNGRYDISKIPDIYDCIKYDVQHNGSLKLENTMELYRLSKALADIVIPQEYGITKAEKLEIAKGYCTPLVRKIRSDLQRTQDDDTVNKLHPVYSRGVLSPERHVRTRLYFTSESHVHSLLSILRYGALCNESKDEQWKRAMDYLNVVNELNYMTQIVIMLYEDPNKDLSSEERFHVELHFSPGAKGCEEDKNLPSGYGYRPASRENEGRRPFKIDNDDEPHTSKRDEVDRAVILFKPMVSEPIHIHRKSPLPRSRKTATNDEESPLSVSSPEGTGTWLHYTSGVGTGRRRRRSGEQITSSPVSPKSLAFTSSIFGSWQQVVSENANYLRTPRTLVEQKQNPTVGSHCAGLFSTSVLGGSSSAPNLQDYARTHRKKLTSSGCIDGFELYSMVPSICPLETLHNALSLKQVDEFLASIASPSSDVPRKTAEISSTALRSSPIMRKKVSLNTYTPAKILPTPPATLKSTKASSKPATSGPSSAVVPNTSSRKKNITSKTETHEHKKNTGKKK

SEQ ID NO: 133 - protein, 575 aa, Homo sapiens
MSHAAEPARDGVEASAEGPRAVFVLLEERRPADSAQLLSLNSLLPESGIVADIELENVLDPDSFYELKSQPLPLRSSLPISLQATPATPATLSASSSAGGSRTPAMSSSSSSRVLLRQQLMRAQAQEQERRERREQAAAAPFPSPAPASPAISVVGVSAGGHTLSRPPPAQVPREVLKVQTHLENPTRYHLQQARRQQVKQYLSTTLGPKLASQALTPPPGPASAQPLPAPEAAHTTGPTGSAPNSPMALLTIGSSSEKEIDDVIDEIISLESSYNDEMLSYLPGGTTGLQLPSTLPVSGNLLDVYSSQGVATPAITVSNSCPAELPNIKREISETEAKALLKERQKKDNHNLIERRRRFNINDRIKELGTLIPKSSDPEMRWNKGTILKASVDYIRKLQKEQQRSKDLESRQRSLEQANRSLQLRIQELELQAQIHGLPVPPTPGLLSLATTSASDSLKPEQLDIEEEGRPGAATFHVGGGPAQNAPHQQPPAPPSDALLDLHFPSDHLGDLGDPFHLGLEDILMEEEEGVVGGLSGGALSPLRAASDPLLSSVSPAVSKASSRRSSFSMEEES

SEQ ID NO: 134 - protein, 1391 aa, Homo sapiens
MNSPVDPGARQALRKKPPERTPEDLNTIYSYLHGMEILSNLREHQLRLMSARARYERYSGNQVLFCSETIARCWYILLSGSVLVKGSMVLPPCSFGKQFGGKRGCDCLVLEPSEMIVVENAKDNEDSILQREIPARQSRRRFRKINYKGERQTITDDVEVNSYLSLPADLTKMHLTENPHPQVTHVSSSQSGCSIASDSGSSSLSDIYQATESEVGDVDLTRLPEGPVDSEDDEEEDEEIDRTDPLQGRDLVRECLEKEPADKTDDDIEQLLEFMHQLPAFANMTMSVRRELCSVMIFEVVEQAGAIILEDGQELDSWYVILNGTVEISHPDGKVENLFMGNSFGITPTLDKQYMHGIVRTKVDDCQFVCIAQQDYWRILNHVEKNTHKVEEEGEIVMVHEHRELDRSGTRKGHIVIKATPERLIMHLIEEHSIVDPTYIEDFLLTYRTFLESPLDVGIKLLEWFKIDSLRDKVTRIVLLWVNNHFNDFEGDPAMTRFLEEFEKNLEDTKMNGHLRLLNIACAAKAKWRQVVLQKASRESPLQFSLNGGSEKGFGIFVEGVEPGSKAADSGLKRGDQIMEVNGQNFENITFMKAVEILRNNTHLALTVKTNIFVFKELLFRTEQEKSGVPHIPKIAEKKSNRHSIQHVPGDIEQTSQEKGSKKVKANTVSGGRNKIRKILDKTRFSILPPKLFSDGGLSQSQDDSIVGTRHCRHSLAIMPIPGTLSSSSPDLLQPTTSMLDFSNPSDIPDQVIRVFKVDQQSCYIIISKDTTAKEVVFHAVHEFGLTGASDTYSLCEVSVTPEGVIKQRRLPDQFSKLADRIQLNGRYYLKNNMETETLCSDEDAQELVKESQLSMLQLSTIEVATQLSMRDFDLFRNIEPTEYIDDLFKLNSKTGNTHLKRFEDIVNQETFWVASEILTEANQLKRMKIIKHFIKIALHCRECKNFNSMFAIISGLNLASVARLRGTWEKLPSKYEKHLQDLQDIFDPSRNMAKYRNILSSQSMQPPIIPLFPVVKKDMTFLHEGNDSKVDGLVNFEKLRMISKEIRQVVRMTSANMDPAMMFRQRSLSQGSTNSNMLDVQGGAHKKRARRSSLLNAKKLYEDAQMARKVKQYLSSLDVETDEEKFQMMSLQWEPAYGTLTKNLSEKRSAKSSEMSPVPMRSAGQTTKAHLHQPHRVSQVLQVPAVNLHPIRKKGQTKDPALNTSLPQKVLGTTEEISGKKHTEDTISVASSLHSSPPASPQGSPHKVGSIISDHSSKISGQSCPGIGGAYLQKKILQITRSTAKRTDSTEKATEENRDRTSCENTTRKRMTSPFRRLRERMLSRERLVNSQKEDTDHNQATESCEKVKDVGSNIKDEKGSAIFNSNSQGNSNTLNCFYTRFKSKRRKTL

SEQ ID NO: 135 - protein, 565 aa, Homo sapiens
MEDSDSAAKQLGLAEAAAVAAAAAVAAAAAAAAGGEAEEPVLSRDEDSEEDADSEAERETPRVTAVAVMAAEPGHMDMGAEALPGPDEAAAAAAFAEVTTVTVANVGAAADNVFTTSVANAASISGHVLSGRTALQIGDSLNTEKATLIVVHTDGSIVETTGLKGPAAPLTPGPQSPPTPLAPGQEKGGTKYNWDPSVYDSELPVRCRNISGTLYKNRLGSGGRGRCIKQGENWYSPTEFEAMAGRASSKDWKRSIRYAGRPLQCLIQDGILNPHAASCTCAACCDDMTLSGPVRLFVPYKRRKKENELPTTPVKKDSPKNITLLPATAATTFTVTPSGQITTSGALTFDRASTVEATAVISESPAQGDVFAGATVQEASVQPPCRASHPEPHYPGYQDSCQIAPFPEAALPTSHPKIVLTSLPALAVPPPTPTKAAPPALVNGLELSEPRSWLYLEEMVNSLLNTAQQLKTLFEQAKHASTYREAATNQAKIHADAERKEQSCVNCGREAMSECTGCHKVNYCSTFCQRKDWKDHQHICGQSAAVTVQADEVHVAESVMEKVTV

SEQ ID NO: 136 - protein, 1454 aa, Homo sapiens
MAPVQLENHQLVPPGGGGGGSGGPPSAPAPPPPGAAVAAAAAAAASPGYRLSTLIEFLLHRAYSELMVLTDLLPRKSDVERKIEIVQFASRTRQLFVRLLALVKWANNAGKVEKCAMISSFLDQQAILFVDTADRLASLARDALVHARLPSFAIPYAIDVLTTGSYPRLPTCIRDKIIPPDPITKIEKQATLHQLNQILRHRLVTTDLPPQLANLTVANGRVKFRVEGEFEATLTVMGDDPDVPWRLLKLEILVEDKETGDGRALVHSMQISFIHQLVQSRLFADEKPLQDMYNCLHSFCLSLQLEVLHSQTLMLIRERWGDLVQVERYHAGKCLSLSVWNQQVLGRKTGTASVHKVTIKIDENDVSKPLQIFHDPPLPASDSKLVERAMKIDHLSIEKLLIDSVHARAHQKLQELKAILRGFNANENSSIETALPALVVPILEPCGNSECLHIFVDLHSGMFQLMLYGLDQATLDDMEKSVNDDMKRIIPWIQQLKFWLGQQRCKQSIKHLPTISSETLQLSNYSTHPIGNLSKNKLFIKLTRLPQYYIVVEMLEVPNKPTQLSYKYYFMSVNAADREDSPAMALLLQQFKENIQDLVFRTKTGKQTRTNAKRKLSDDPCPVESKKTKRAGEMCAFNKVLAHFVAMCDTNMPFVGLRLELSNLEIPHQGVQVEGDGFSHAIRLLKIPPCKGITEETQKALDRSLLDCTFRLQGRNNRTWVAELVFANCPLNGTSTREQGPSRHVYLTYENLLSEPVGGRKVVEMFLNDWNSIARLYECVLEFARSLPDIPAHLNIFSEVRVYNYRKLILCYGTTKGSSISIQWNSIHQKFHISLGTVGPNSGCSNCHNTILHQLQEMFNKTPNVVQLLQVLFDTQAPLNAINKLPTVPMLGLTQRTNTAYQCFSILPQSSTHIRLAFRNMYCIDIYCRSRGVVAIRDGAYSLFDNSKLVEGFYPAPGLKTFLNMFVDSNQDARRRSVNEDDNPPSPIGGDMMDSLISQLQPPPQQQPFPKQPGTSGAYPLTSPPTSYHSTVNQSPSMMHTQSPGNLHAASSPSGALRAPSPASFVPTPPPSSHGISIGPGASFASPHGTLDPSSPYTMVSPSGRAGNWPGSPQVSGPSPAARMPGMSPANPSLHSPVPDASHSPRAGTSSQTMPTNMPPPRKLPQRSWAASIPTILTHSALNILLLPSPTPGLVPGLAGSYLCSPLERFLGSVIMRRHLQRIIQQETLQLINSNEPGVIMFKTDALKCRVALSPKTNQTLQLKVTPENAGQWKPDELQVLEKFFETRVAGPPFKANTLIAFTKLLGAPTHILRDCVHIMKLELFPDQATQLKWNVQFCLTIPPSAPPIAPPGTPAVVLKSKMLFFLQLTQKTSVPPQEPVSIIVPIIYDMASGTTQQADIPRQQNSSVAAPMMVSNILKRFAEMNPPRQGECTIFAAVRDLMANLTLPPGGRP

SEQ ID NO: 137 - protein, 877 aa, Homo sapiens
MCDLRRPAAGGMMDLAYVCEWEKWSKSTHCPSVPLACAWSCRNLIAFTMDLRSDDQDLTRMIHILDTEHPWDLHSIPSEHHEAITCLEWDQSGSRLLSADADGQIKCWSMADHLANSWESSVGSLVEGDPIVALSWLHNGVKLALHVEKSGASSFGEKFSRVKFSPSLTLFGGKPMEGWIAVTVSGLVTVSLLKPSGQVLTSTESLCRLRGRVALADIAFTGGGNIVVATADGSSASPVQFYKVCVSVVSEKCRIDTEILPSLFMRCTTDLNRKDKFPAITHLKFLARDMSEQVLLCASSQTSSIVECWSLRKEGLPVNNIFQQISPVVGDKQPTILKWRILSATNDLDRVSAVALPKLPISLTNTDLKVASDTQFYPGLGLALAFHDGSVHIVHRLSLQTMAVFYSSAAPRPVDEPAMKRPRTAGPAVHLKAMQLSWTSLALVGIDSHGKLSVLRLSPSMGHPLEVGLALRHLLFLLEYCMVTGYDWWDILLHVQPSMVQSLVEKLHEEYTRQTAALQQVLSTRILAMKASLCKLSPCTVTRVCDYHTKLFLIAISSTLKSLLRPHFLNTPDKSPGDRLTEICTKITDVDIDKVMINLKTEEFVLDMNTLQALQQLLQWVGDFVLYLLASLPNQGSLLRPGHSFLRDGTSLGMLRELMVVIRIWGLLKPSCLPVYTATSDTQDSMSLLFRLLTKLWICCRDEGPASEPDEALVDECCLLPSQLLIPSLDWLPASDGLVSRLQPKQPLRLQFGRAPTLPGSAATLQLDGLARAPGQPKIDHLRRLHLGACPTEECKACTRCGCVTMLKSPNRTTAVKQWEQRWIKNCLAVEGRGPDACVTSRASEEAPAFVQLGPQSTHHSPRTPRSLDHLHPEDRP

SEQ ID NO: 138 - protein, 318 aa, Homo sapiens
MSAHNRGTELDLSWISKIQVNHPAVLRRAEQIQARRTVKKEWQAAWLLKAVTFIDLTTLSGDDTSSNIQRLCYKAKYPIREDLLKALNMHDKGITTAAVCVYPARVCDAVKALKAAGCNIPVASVAAGFPAGQTHLKTRLEEIRLAVEDGATEIDVVINRSLVLTGQWEALYDEIRQFRKACGEAHLKTILATGELGTLTNVYKASMIAMMAGSDFIKTSTGKETVNATFPVAIVMLRAIRDFFWKTGNKIGFKPAGGIRSAKDSLAWLSLVKEELGDEWLKPELFRIGASTLLSDIERQIYHHVTGRYAAYHDLPMS

SEQ ID NO: 139 - protein, 562 aa, Homo sapiens; identical to SEQ ID NO: 109

SEQ ID NO: 140 - protein, 485 aa, Homo sapiens
MNEYPKKRKRKTLHPSRYSDSSGISRIADGFNGIFSDHCYSVCSMRQPDLKYFDNKDDDSDTETSNDLPKFADGIKARNRNQNYLVPSPVLRILDHTAFSTEKSADIVICDEECDSPESVNQQTQEESPIEVHTAEDVPIAVEVHAISEDYDIETENNSSESLQDQTDEEPPAKLCKILDKSQALNVTAQQKWPLLRANSSGLYKCELCEFNSKYFSDLKQHMILKHKRTDSNVCRVCKESFSTNMLLIEHAKLHEEDPYICKYCDYKTVIFENLSQHIADTHFSDHLYWCEQCDVQFSSSSELYLHFQEHSCDEQYLCQFCEHETNDPEDLHSHVVNEHACKLIELSDKYNNGEHGQYSLLSKITFDKCKNFFVCQVCGFRSRLHTNVNRHVAIEHTKIFPHVCDDCGKGFSSMLEYCKHLNSHLSEGIYLCQYCEYSTGQIEDLKIHLDFKHSADLPHKCSDCLMRFGNERELISHLPVHETT

SEQ ID NO: 141 - protein, 821 aa, Homo sapiens
MDPECAQLLPALCAVLVDPRQPVADDTCLEKLLDWFKTVTEGESSVVLLQEHPCLVELLSHVLKVQDLSSGVLSFSLRLAGTFAAQENCFQYLQQGELLPGLFGEPGPLGRATWAVPTVRSGWIQGLRSLAQHPSALRFLADHGAVDTIFSLQGDSSLFVASAASQLLVHVLALSMRGGAEGQPCLPGGDWPACAQKIMDHVEESLCSAATPKVTQALNVLTTTFGRCQSPWTEALWVRLSPRVACLLERDPIPAAHSFVDLLLCVARSPVFSSSDGSLWETVARALSCLGPTHMGPLALGILKLEHCPQALRTQAFQVLLQPLACVLKATVQAPGPPGLLDGTADDATTVDTLLASKSSCAGLLCRTLAHLEELQPLPQRPSPWPQASLLGATVTVLRLCDGSAAPASSVGGHLCGTLAGCVRVQRAALDFLGTLSQGTGPQELVTQALAVLLECLESPGSSPTVLKKAFQATLRWLLSSPKTPGCSDLGPLIPQFLRELFPVLQKRLCHPCWEVRDSALEFLTQLSRHWGGQADFRCALLASEVPQLALQLLQDPESYVRASAVTAMGQLSSQGLHAPTSPEHAEARQSLFLELLHILSVDSEGFPRRAVMQVFTEWLRDGHADAAQDTEQFVATVLQAASRDLDWEVRAQGLELALVFLGQTLGPPRTHCPYAVALPEVAPAQPLTEALRALCHVGLFDFAFCALFDCDRPVAQKSCDLLLFLRDKIASYSSLREARGSPNTASAEATLPRWRAGEQAQPPGDQEPEAVLAMLRSLDLEGLRSTLAESSDHVEKSPQSLLQDMLATGGFLQGDEADCY

SEQ ID NO: 142 - protein, 221 aa, Homo sapiens; identical to SEQ ID NO: 89
